United States Patent Application Publication US 2007/0218071 A1 - sequence listing, part 2

SEQ ID NO: 77 - DNA, 1089736 bp, Mus musculus
  misc_feature (1)...(1089736): n = A,T,C or G
cgaggaggaagaggaggaggaagcctagggggctcggcgcgggtgtgtgcatgtgtgcatgcgtgtgtgagtgcatgtgtgtgagtgccaccgctgcccaggacccccggccccgaaggtgttggctgaaatatggagaatagtcttggatgtgtttgggtacccaagctggcttttgtactcttcggagcttccttgctcagcgcacatcttcaagtcacgggtaagaggtcttttcctttcttctcttcgctcccccaccccttaccccttccccttccccttcccgtttcatttggagagtagaattagagtggaagagagatactgtattcggttttctctctgcctaccgttttctcgcgaatgataaaagacacaagaagactttttcctcctgggggcggaggatgttggtggggtcgagggcatctcttcgcgctttttcaatcttgtgcttctcgcttgcgtctttgcttttacaaatacttgttttgtcttggggggcaaggtggtgaaagtgatggggatgctgatggggttgtattctcagagcctcacaagcctggaaaggggctggtggatgggataacaggagtaagcggggatgacatcaaaggtgcttagagcaagtctgtgctggctacatctgctggggatgtttgtgtgaatacatgcgaccctggctttgcatttttttttttttttgtacgtgctgattgagaatcgagaaagagacatatccgttttgagtactttgggtgagtgcatagcggtgcttgaagaagaggggaagaggtggcagatgaagggatatgtatttgagattttaacggtgggtgaatgctgtttgctagttaagtctccaaatacctccaagacacctccaaactccaaatgatggatattctgggagacaggcctccggacctcacttggcaagcgtattttctaattaaaaatggcaaaactgttgcggggctagacgaggagaaagaaagatcctaaggctgctccctgggtgctgcagtctccgaatgcggagctgaggcttctttctgtggccgaaagaataaaaacgaacaaagtgataagattttctcgttttgcgggacaccaccacaagtaggtgggcactgagtagaggttgctggtctgctggggaaagacaggacagctgctgcgtgagcatgcaagtcccttcggaatcgacctttcctcccatccaaagagcgcctcggctggggccaggagttagagaggagcgccccaacctgtgcctccgaaattaacagggaataaaattaaatcacagcagtcaagtcccctgtctccccggagtcctaaactccggctgtctggtcccagttgcagaatcaagggttgcgaacacaagcagagaaggcgttgcttcacggtgtggcaagggattcaggccatgaagcgagcaccgagccagcattcaggattaacgcgagcccaggctctgggctttaatccttctgtaggcagccagagcgagtcagtctctctctctctctctctctctctctctctctctctctctctctctctctctctctccctctctctctctctctctctctctctctctctctactgtgtgtgtgtgtgtgtgtgtgtgtgtgtgtgtacgcttgagtgtatgtggtgtgtgtgtgtgtgtgtgtgtgtgtgtgtgtgtgcttgcgtgctgtgcgatgcctatgatgcgcgcgcttaccctcaccctcagttcagttgccggccctccctcctccctctgggcggtcccctcctccctggctcctctctcccagagctttgtcctctgtaattactccctttgaaggtgggaggtaggtgtggagagggtagggggtagtttattcttgtggtaatagaaagtgttaaaaatgccctctttaaactgcaaatgcnnnnnnnnnnnnnnnnnnnnnnnnnnnnnnnnnnnnnnnnnnnnnnnnnnnnnnnnnnnnnnnnnnnnnnnnnnnnnnnnnnnnnnnnnnnnnnnnnnnnnnnnnnnnnnnnnnnnnnnnnnnnnnnnnnnnnnnnnnnnnnnnnnagagagagagagagagagagagagagagagagagagagagaacccatagttgacaatattgaattaagccaagtgtgcaaaatagacaatgttatcacttatgcaatattttaaagccattgccaaatgatcatttccctgcaaaaactcgtggtagatgaatggagatagattcaatatgttttattaatccttataataacatcaccttcctattcatttagggatttgtttgtttgtttatatttagtcatttatttgtcacgtttttatttcaattattaccttctcaaacttttctcttcgtagacaaatctaacaacaacaacaacaacaaaacccctacacaaaaatatacatgtgtaaggaaagtgccggtgaatgacctgtgctgatcattgttctaaacttctccacgtttctaaaaacatttgtgttatttgaaaacgaaggcaatgtgctttgtgcaggtcccaagtctgtgggtggcgtgctttgaagattttgctaattcagtcactctcctcttctttgctcatttatctgaatatcatccttttccttagtagcaatttttgggagcatggcaccaaagaaacatagttcactccaagaaaggaccggtaggaggtgcccttaataaggccaaatgtctagttcccaggcactgaaattcccactcagcagaaggttttaaagactttgttgattggtaacaaaggattatggagactagcacaatagcacactggcccttcccctcattctgggcaaaatgtgaaacttgtccatttgaatgcgattatgatgtggcaacaaaaaggacatccctgcacagtgtctgtgcggagtgaggacttgaagctgagagaggaaggcagtgctcttctagtttgctcttgtaggatgctctcctctttacttgatgtgagccctgtgcagaggcaccaggtagattctcatgatttcaggtaagatgggaatttcagacattgatgaatcaaatgggaagtttacccattaactatttaatcatccatgcgtgtttgtgttaacgtttagtttgtgttgatgtagtctagatataatgaaatatatgtaatgaaataacgctggctctgtccagctcccttttcctatcaacagtcacagcaggtaaggtgcctggtctgggcttgctgtgcagaggaaagaggatgtcaggacctgggttgcctgggtaagcaggccctgcactgctcccactagtgctgtagtataaatcaccagtgacctgtcacactctccatttcccaccctgcagcagctgccctctgagttatgaagcatgtgaaacagccagcacatgtgttatatgtgaatatattagggtcagtgcatttgctgtaatgctcttaacagcaaggctgcagcaaggggctgatagacactctccccccccccgccccccccaggaagagatttataacttcttgtgtgtgtgtgtgtgtgtgtgtgtgtgtcttccatttattccctggcaagttaacctctctgcagactttcttagttcattgagaaggacgagctttcatcctgtctagttcttgaatggaacgttgccagatagtccctttggagtacagggtaagcttctaaaccaataggaatctggcaagagcttgggggaggagattcatttaggaagctgagatggtttgccgctattgttgtctgtttctagaagatacaccatctaagggaatcacaatacagttacctcaaaaaggtttctctcttcttgcctcatgcttcccactgtatatatccacgcactattctaagattcctcttatatatgtgaattgttcctgagacgtttctagcaacacacccacggtaacaccatataaacacagtttggtctctatcatctgtatagagattgacttaaatcctgccaccctggtcctgtatttatcgtcaggggtctctgaatgtttaaaggaagctctgaaggttctgaatggactctttccccgtataagactgcattctaagatattttaaagcaaacagtcttccaacttctttggagaatttaccatcttaaaccatgtatatgagacttctgtctcatgctttttcctgtcaggataaccagtaaaggatgcggttgctgggagtcattgtcttaagtaaaatacaaggagacctgcacagagagcagctttccacagccccctgccttctccttcaagtgtctaaggaaggacattgaggatttcactcgtaaagtgctgctggcctggatccaactccccccagtttccacagacctggcctgcattaccatgggaaacttatgccaaatcagaaacaggttgctgggttgggtatttgttgcaggagcatcttttcaaatgataacttttcatctatttctaccggtaacctttttgaggaactatatacatacattttagaaagccttatagcattcgtggggttcaaagaataatgacataaacccacgaatggtgacttacttgattgattactgattaaaagttatcagattctagaaaaaaaatagaatagtctctgaaataaaatggggaatgtgatagatatatagaattcacaaaatataaacatgttatttcctttcctaccttctctgtgtcagggtgacagtagagaagctcttgaacatttcaggacctgctgtacctgggcttgtgatatggctggttcaagatcagaatacaccaaattcaatagttgtacaattcctcgtgaaattttcagtggcctactgtagattgcttgcttatctcttggctgtccttggagaatccacccctcctccctacacaatattatgtcattaaggccactcttgttgatgcaaccaagtccttgctctataagccttatgattaacatgctggattatactttagaagacatggggacttgccttaaatataatttttaaatgcttatgactacatcttttagtgaaacatgaactgttgtcataatagaagtaaatagttctaatatcctgggtgactcacctgtggcttccaagacatggctcccaacattctagagttcacaagttttgagaaagggctgggtcatacagggtgatgggtgtgatgacacctggttgtgtgatttggtcacaaagttgttacacaaggttgaagcatagaacctcaattttcattaatgattgcatttttcaaagttcatagcctttctcactagccttatcatgcttacatctatgatctgcccccaatacatttnnnnnnnnnnnnnnnnnnnnnnnnnnnnnnnnnnnnnnnnnnnnnnnnnnnnnnnnnnnnnnnnnnnnnnnnnnnnnnnnnnnnnnnnnnnnnnnnnnnnnnnnnnnnnnnnnnnnnnnnnnnnnnnnnnnnnnnnnnnnnnnnnnnnnnnnnnnnnnnnnnnnnnnnnnnnnnnnnnnnnnnnnnnnnnnnnnnnnnnnnnnnnnnnnnnnnnnnnnnnnnnnnnnnnnnnnnnnnnntctcccacgtgagtgccaaccccctcacaatacatgtctcaggttcagcactgtactaacatgaagaaatgcaggtaggctgattgatgttcaaaattactacagagctctaaagttctgtgacaaatctagcctgaggcttaaaacacctctttacacaactcttaaaaagtatttttcttaatagatcagaaatgctccaattttgtcctatgatgtgacttggaaatatggaataatgtatatgagtgaacattcctctattttcattactgatggtaatttgccagtggtcagttgagtatatattgctcctatgaacagttttaaacaaccatagggtatatagctttcatttttggggcaaaagtccagcaatgaaggaaacaaacaaatcatttcctatttattgatcctatttcacaagtgcactgttatggcatgacttgagtggaagatttttcttttctactaaatttctggagcccaataccaatgactcatttatgttttgtgttatgtacagatatatgctttgtttaacaaaaccaaattctgtaacatgtaacaggcttctttttatatataatttcccagatgtttgttgcaattagaaatttcttccttgtgtttgctacatactgacctggacagaagtcaatgctcaagactatgtaggaaaaacatgttctattgaactaatggattcttcatgatcttatttagtgaaaaatatcatcttgttgatatttactagttgtgtctttattatgatgatctagttatttacttattatttgttatttatttattattgtggccaaataagaaaaactatcaataagactttatcctgggatatctaaagtgttttaaatctgtatgtatatttctatagaataaaaaatggaagtgatatgaataatattcattcagaccatttgccttagtagataaatattcctgttaaatctcaatatttgtagatttcaccaatagacttttagaaatattttttttcactcaacagccatttaagatataaaacatggtttaatctatttgccatatatttatgacatcactatgatgccatttttacataataggattatttctgaagaactgaagataaagcattgtaattttaaactttaggacacaagtttctgtgacatattttaaaaacaatgattttagattcagaaagtgccttttctttgcattgctatgtccagtttaaactcttccctgtccttccttcaatcttgctttgctcacttttacacaaattgtctttcatgtaagaaaagagaccctaaaccgggatgcgaattcattgtcaaagaaaaatgccccaatttatttaattaatgggtttgtggtaattctaaaatctgatatactaatttggttgtcatgtgttcttcatgaaccctagttttccttgttaaatgaaggagtggactatacccatgctagttttcttctagtctcaacatcacaatttacttaaattatagactgcacatatatgtagtgtctggtgtgattaatgataacactgaagataataacaataataaaacaaatttaccaattgatagttttctgaattttgtgttaattaccccttgtaatttgtaacattgccacatatgtatctttctttaacatactctttggttctgttacatgtggttgtaatcaaagaaatatatttgtttctgatttcccttatggcaatacattaagtatctcagactgccagagtatgtgctcatagctacactcaattactctattgtgtaatactccaccactttattggttataacttacttgagatactgtcaatagactttttgaactccaattttctgttgcttgcttttatgatctaagcatttttatacacattgttcatgaaacattaaccatcatttccaggtgtgcatgtaggtgtggaaatgctgagtcgtgaaaacagaatctgtatattaagaggcagtggtatgctacatttattatactaccacaccaggaacatatgaaagtcttctttgttccatgtctctaccaacacttggtattttcatttgcttaatttgccttcatctggtggatgtgaattaacatctcattatgggtttaatttgcatttccctgattgctaataaaactgcacattttttttcctcataaatttgttggccatttgtggctgcagcaagatgcttctatgattctgtttcttcagctgagcacccattttatcttgttggtagctattctcttttcttactaatcaacctttgatcttaagcatggatatcatcagcagttgacattttaggaagttgtcattttatgttacaccaagtttatcccactccaggcactatttaagcactttcccaaaacgtatgctagaccttatttaaaaaaaaaaaaggatagccttactcactttaataatacttattgtaatgagcaacattttctgtgtatattcatgtacccagtttatcacacctttatagaagacagcttacaggtaaacaggcttctaggacagcagactaaattccaggcacagtgggaacctcctgaatctaatggaaccaaaagaagattgaattataatcctaacagcagataccaaatctaagtgaaaatataccctattctgcccatttgaccttgaatatgtttccaatgcagtaaaatgcatagtacgtatgattgtgggtttcagacagcctgtgcttgaagaaatatatgcctttaactttgtataggttcttaatttattccgcttggtcccattgggaagctaacaaaggtctgtggattacataacacatttggatatgctggaaggggcctctctagctggttgccttctgtgcctcctcattagagatgtaagccaaggctgagacatctaagcaagccttgcattgagagtcctctacccattgttcccacatcttcactcagcctcatgggatctcagaagaatataaattagagagaaaaatctgcaagcttttcctttcatgtttaatgtctgggcagagctgttccctgctggataatttctagttattttcttcctgatttgaaacatctcaagggatgggttgttggttacttcccttgggaaatatttcagtaacacaacagttctgttttgttttgttttgttttttgttggtttttttttttttttttttttggctgttggaaatttgctttgtaatttatcttaaataatgctgttccaaatattcttcttaatacctgtgacattgaatgtggtgttcttgttttccctttgcaaagacacagcctcttctatgatccagctggttaaatgttttgactctaaattgttttcatctcccaggtcatctttatttcctctaactctagctatttagttcatttaatctttcctgttatccttcttgaagcttaactgtgcttcctgttttacccaaactccttctaatttggataaccggtaatcaaaggcctgcaatttaatgtaggtttctagacaagatttccccagtaatacattgtaaaatatagattcatcataccctaccatgttaaagccagagacacattttttttttgtcttagaatccttgagttctcacttttcatgaagttttcttaaagcccaatataattattaagcttgataagatcaaatgagatcaaatatttgactcaagatcatcattatggatatttaacaggtgttttgacatgctaaatgggatgttttaatgtatctttcatgagattttattaaggtcaatgagacagttgcatacatagatgaatggaacccacaacagaacaaaacacttattaagaagggatacaaactggagagattgagaaagacagcactacagtgtttacatgttctatcattaatatgttaatactggcaaggtgggctggtacagccaatcccctcatctctgtactcctagaattcttagattcatagatcgattgagtctctctctctgtgtctatctctgtctctgtctctttcccttcctttgtctctctgtctctgtctctgtctctctgtgttgtctataaatcatagggatgcaaatcgttgtcaattatgtgtaacctaggccatatttaaataaagctggttgcagtggcacacatctatctataatccaagaaattaagggctagaggttaaatattataagtgtgagcacaccttggcctgcagagtaatttcaagatcagtctggactacaaagcaaaatcctgtctcaaaaaccaacaatacaaaactaagctacgagaaaataaaatgaagtaaaatataaataagctaaggcataggtatgggaagagtgaaatttagcatgaagtatcttgcagatcattagagctcagatggataagcatactactcaacaaatatactctactgtgataacatgttaaagacagtgaaggcatccagagatcagaagaaaagaaataataaaaaaaagaggttttatttaccaagaaaactgtaggtgatctgggagacaaaataaattaataagctaagaagagggtgtttgataaggtgcacagggagaaaaccagataaatagagagattgccaaggtaccaaggtagaagaaaaagcagtgaacaccagatgagcctagcttccttcaggaaaccactgcatagtaggggtctaagtatcgcttctcagccttttggctaagatcaagtgtagtagggatctaggtgtggctgcagaacattcctggtcctctcatcaacatctgattctcatgctcaaggaacaccagtagaaatcactgagatgagtttgtgtcaagaagcatccattgatattttgtcatcatttaaattttaggtcaataacagctgacccaaggtccccttgctcttctcttcagccttttttagcttttccctttagctcccctccataccttcgagatcagacagcagtggtctctaccaggaacccaaaacccaccatgcttggcttagatccagaatggaccacagcaaccaaagaatggacacccactcaacaagaatactaccagatagcgaccccaagcagcattccaaacatcgtaatgtttagttaaatttcataagaaactctggccctaattcatgagttagttatgaatttatagctgttctcttctacttgttgacagttgaactttactgatacaaataacatagttagagagaagctgtttggggaaatatgaagagccagacaaaagcaatgtttattaatgagcatgctcaggaggccaatttaactggggagagagagaatagggtttcactcatgtgtagtctgaggtatgagggtagacatgagcatttcttccttgggtggccttctgaaaactatatttctgatttctctcaatgagttacaaaggaaaagtaagcctaagttttgttggaaattgtagccttccattatattttctctacattgcagtttcttcaaatatagttggatgctctctttgctttaatctgcagctcaggaggaaatgagtggtttgtgaccacatgatattactgtacccaatagtcactgtgccagtgagtcaccttatacctatagggtctgactgtctggtctttggccatgaagacagacatgatgtaatctagagtacaagaaaacactagccaggaaatgagtttggtttaagcacttaatctcactgtatttcaacattctcctctactcaacagacagaaaatcaacctatgtggttaaactgtaacttagtgataaagtcaacccactggttaaatatataaagtatactatatctttcagttcacttgtaattactatttcatgaatagaatcgtttgctaacataaccnnnnnnnnnnnnnnnnnnnnnnnnnnnnnnnnnnnnnnnnnnnnnnnnnnnnnnnnnnnnnnnnnnnnnnnnnnnnnnnnnnnnnnnnnnnnnnnnnnnnnnnnnnnnnnnnnnnnnnnnnnnnnnnnnnnnnnnnnnnnnnnnnnnnnnnnnnnnnnnnnnnnnnnnnnnnnnnnnnnnnnnnnnnnnnnnnnnnnnccacccccactcccctgcccacccactccccctttttggccctggtattcccctgtactggggcatatgtgtgaaagatactgaaataaaataaatcatattttactaaaacttttgacattactatgtatatgagttagtgggtcctgtcccatacctttactggatttaggggttgaaggaacaactaggaggtcttaactcagtgttataccaatcaaacacagtggcctctaacacatgcctatggactgtaccttcaagcaatcttcaatcgctacctcttcttattttagctatgtgcattttcttcagacccagctacctagagtgaatgcctagaagctaactcatgctttgttaacaaaaaccacatggtagaatacacctctaagatcctttgatctggagaagcacctttcttcttgattcttcatcagttttcaggacgtctttttacctgttaatttataacctcagatagctacccaagtctcagtattttatttcattaaaaaaaaaaaaaagctcttcagatgactgtaatgcccagctactacactggtatttcaacaattattcatgctcttgtccacggaacaagaacatttgtatcacctggggactcattagaaattcagaaagcctggccattgcctggatgtgttcctttagggtgaagggttattgagaaccatttgcataggagacagagacttccctagtccacacagctataactggtcatacaatcaatggaaaaaaagtgccccagccacatgaatttcagcttagcttgcaacatctttgggtagcctggctttaggtcttacaatggtcaactatccacacatcaaagtggcttctggcttgctgtttttctttactactgaactacctctcagaggtcatgccatgctttattttctttgagattgaagccccttagaatttttttgagcatttgatctgcctttcccctccttttcacgaggagatgacacacttcaaaggggtccgctggtttttcacttcccatcactccctctgtccactctcttccttcttgaaaatactatgattcacaagaaaagggaggcacataaaagggatgctggagcctggggtcctttaggtctgttctgaaagtacacacttgctaaaagtgagaccctggtggaactgaccccaaactgaaccttggcttttgattggaaatgctctttgggccatgaaataatccaactgctcatttgcctgggctactgtgaaggggaaaggaaaggcttaagtggggtgtttaaagaggagtaaagctttcagacagagatctagctcagccaggggctttgaagcttgtgccctgccctgcctggttgagagacaagctttaaccagagctccaaatcacagtggagtaggagaggacgagagggctcagctgtgcagactggatcaatctgaatgaaaatcactagtgttcccagtggtgaggcaagtttctgcttagctcatgaactgtaggcccttctctggtcctgctggaaaatgagtcgagctgttgtgaaaggttatgtaaggctgctgttttacttttccccctggggttaaattctatttatagaggggtgtactacctcccaccaaaactacatctcccttgctataacttagcaagagaatgcaatcaattttcaggaaagaattaaggaacaaaagggagaacagaatcgaaggcagagatactgaggcatacagagaaaaaccagcacaaaaaagaaagctctgtcatgggttgctggaggaatggtagatagggtgatgagttttctgtttgctgggagcttgctaggaagcaggatttacagtatcaaccagaaagcaacttcttgtaaactgtgactgtggctcaccctgaattagccagtcttacttgggcatgtctaggaagaatcaacgttgctttttttcttctcttcgctttcattctttctttctctctttcttctctctctctctctctctctctctttctctctctctctgattctttgtttgttttgtttttcctctttttttttttctgctgagcagtacatccttaagcaattaagacatttctgcctgcaggaactttccatatgagggttagcagtcacactaaccacagcggagagacaattggagagggcagtaataggttctagtatgtggttgcttttccaacagttctgagagtattggtgcctgatagaagacaacttgcgtttaagctatttatcaggtcattgagaccttacactgtagtgaaatcagagataacacttcaaagtgagtgttggtctttggccattattctgctaatacagtaaacaacagatcattttacctagtatgttgtcttttggagattataaatttgtaatgttattggtgatcccacatgccaagtgtttgtgttccattatatgtagtagtttgttcatgcttgcatgttttttatttgtggactttcccagattccaaagttacccttgtgtatactgatttagacctttcagctaaccacaaggcaaacttctaactttctgagttattttatacaacagggttattctttgatcttttctctctgccatctatttcttcctccttgactttttcttttgtatatactgttaataattttactggcgatattcccgagtgcctgtggaaaagttaagagtcaaggaaatctctcaaatgctaaatgcaaatgtatgaagtctacagaatttgctatctccataagccctggtcctgagacacccagggcatttgtcagcaccaatattgaatatggaacaaggcaagagaagtgaataattactttctacatagtaatgccaaggatagactccaagtttgccttagggcaatcattcctgaagacctagatgaggcaaaaatattaaaatgttaattttgtagaaacctatgtaggagtcaagacaagatcccagaaataaggaaagcttggcaagtgaagacaaatcttttatttaaaagcattggttatgtaaataaggctgtggcatttgttagaaatggctatgtcattggatagactagaaacagtatcccagagttgtttagtgtgcccctgtactagttagggttttactgagagtgagaaccataaagtacttttcacacacctggatgtaaatcttgacaaaatcaatgatgtaaggaggattcaggacccttattccttaaatttgtaaaacattatagattggttaaattaaaaacatatgacagaaatagataactccactccttggcatgtagtatacactaagcattttctgatattatccggattttccacaggagtttatgaagttgatatttgatcatactctatagtgaatttacaaagcttataacaaaaataccaaaacccagctgtagtggcacatacctttactcccagcactggggaggcagaagctggctgatctctgaatttgaggttggtttgttctatagagtgaactgccttagggggaaaacaacaataaaaaagtaaacacacacacacaaagaaaaatactactgccttcagagttatcagaatgactagataagaggacttacacactttgaaacaagataggctcacaaggtgagatagtattactgttactaagacaaaaataaactaggtagctaatttgcaaaagcaagcagcagcagcagaaagcctgtgtaactaagaaaggatagatttgatgggtgagttgtctggagaggatggacagatttccctctgggacactgtgctttatgtttgaggagagcaatggtagtgtttcactgctgagagccagcttcctgctctggtttgtccctagttcctactaccatcaatggtgccctgttcactagcctcttctccaacagatgtctgagaaggctgggaggaagaggcgtacagaagtgacagggtcgtctaagaagtgacgggcagcataaataatgcaattttagaaagaagaggttttgcctgcgaggcgtctcctaataattttacggagatctcgaaggaacagattgctaggagcggggcagatgccaccaggcaccagtttctaacacagagagatgtggtaaccgagaaagcaattttatgctgtgcattgtggccgctagtcactgctggacactggtgtgcacatcttattgctttttgtacaacttggaaaatgcattttttaaaaaaagacctttagtaaattctatcatgtataagtactaatgcaccaaagatattagtccatcaatggatttttgtatattttatatccaaaatgcaagtatcctagcccataattttcaatgtacagccacttaatagcttttccattgtcttttctcagaggatcctgattcatataaagttatgttaatagatagttaatgatgacgatagtgaaaaatgatgtcactacttggttggcttgacacttctttcttccatgtctttgaaatgtattttctatcttggaccttaggaacctatatcaaggggtcaacatcattaatttaagtcatatgttttatccacaaggtcatgaggattgctgactacttatctcttctgagtgaaaaattctattttgtcatttgttctttaaggaagttacctgctctgaaagaaaaactttgatctggtgttgactcttcatgcacaccactgtatgacacatttctttttaaaacaagggtattctgatattttgtacttccaaattgcttaaaaattgttacctagcatcaatatttttatttctcacaccactctgcaataagaacaatgagggttccttggagaaatagctgattcaaggacttaggtaaaaaatgaacaagataagcctggggcatcttagagtgccaggcagtaaagaacaaagaagttcttgtttgtggaaaggaacaaaatcatttattatgatggaagatgtaaaaggagccgacagctaatgggacaggctctgggtggtccaatatgtgaacaagaaattacagaaagctatttcaagaaattatcagagcccatacgatataaatgaatgaaggaatgaatgagtaattaaatagaagattatggtcaaatatatagactaaatccaacgtatgtatatatatatatatattcagctctccaggaagtagtgtggagtcgagacccaaccatactaaatattacctgtgtttggttacctccttccaaagagaagaccatgtgatctggaggtgagcagaacacattttcagtggaaatcccggtaaccacgtgacacagttcatcctcatccaggtgatgaaggtcgacgttatcagtgacagagtcccttgacagtaggaggctgtgatgtgatgtgaaggtccgctggccttcctccttcaaatctctagctcccctctattgagaaaagagaaatataaaaatatatagtctccgtgagcttgcttcctgctgctctgataaacaccatgaccaaagcagtttgaggaggaaaagtttaattcatcttatagtttatgtttcactgtgacattgacagttcagcagggactcgagttgggaagcagaaaggaaagcaagaacagaagagactattgctctctggctccctcaccatggcttgctcagcttgcttaagaatgtctgctataaggatgcaacctaggatcacttacccaggggtgagcactgcctacaatactgagcaagaacataacccacagacttgcccagggggcagactaatagaagcatctattgaagtttcctcttttcaaataaccctctgtcaagatcacaaaaccaatagaatgcataactagcaaccaaacccttaaatgaaagtccataaatattcacccagtgttcttcaaaactatcctaaaataagagaaaaatatgagaaataggaaccaagaacttatgatgtcaaaaaagcataggttaccttgctgtactgtctctaggtaaaattaagatgagctctggaccaagtatgaactttagttgacagtgatggatgctgttgattgatgaaatttcataagtattaatgtccattgttaaaattaatagaaacttgatggatggtatattgaactttgtattctatcttcacaattttcttcaaatttaaagtagttataaactaaatattttctttcaaaatgtatcaacttatcccctatacataaaatgcagataaaagtattttatctctacataaatgtattcttataatggttcccttacgtttccctcatggctccagctacatatgtagcagaggatggtcttgtctgtcatcagtgcaaggagaagcccttggtcctgggaaggctccaggccccagtgtaggggaatgctggggcaaggaggcaggagtgagtgggtgggtggggggagcacactcatagaagcaggggacgggaggatgggataggaggtttctgtaggggaaaaaccggggaaggggatatcatttaagatgtaaataaataaaatattcaaaaaaaaaccaaccaaccaaccaaacaaacaaacaaaaaaaccaaagttccagaaggtatatgataaacctctaataggagctgttgtgtgtgtaagtctgtcagttgtgcctgttggacttttcccagggcctcaggtaagcaccacccctttccaggaaacactggcaatcctctgtgcatccctgattggctgctcaggctctgtgtgcctgagtttactaagttaaatgacagagtgtaaaacactgctctctctctctctctctctctctctctctctctctctctcgtccttcccaccacccccctgttcttcctactgctcactttcgcaggagatattgagagctaagttagcatgtgtctgctttgagacttctacaccataggaatatagaaaacaaaaagcattaaaatagtaataatgtcccctagttatgagactgtatagttgtacagtgaacaacgacataacaggtatcatttatgaaatacttatttttcccttaacttcttaagcagcaatatgtcagttaaaatcctagttcctagacagtgagacaggtcatgatcagagctctgataaacacatagnnnnnnnnnnnnnnnnnnnnnnnnnnnnnnnnnnnnnnnnnnnnnnnnnnnnnnnnnnnnnnnnnnnnnnnnnnnnnnnnnnnnnnnnnnnnnnnnnnnnnnnnnnnnnnnnnnnnnnnnnnnnnnnnnnnnnnnnnnnnnnnnnnnnnnnnnnnnnnnnnnnnnnnnnnnnnnnnnnnnnnnnnnnnnnnnnnnnnnnnnnnnnnnnnnnnnnnnnnnnnnnnnnnnnnnnnnnnnnnnnnnnnnnnnnnnnnnnnnnnnnnnnnnnnnnnnnnnnnnnnnnnnnnnnnnnnnnnnnnnnnnnnnnnnnnnnnnnnnnnnnnnnnnnnnnnnnnnnnnnnnnnnnnnnnnnnnnnnnnnnnnnnnnnnnnnnnnnnnnnnnnnnnnnnnnnnaataaaaactccattttctgctaatcattttcaaacgccatggttttcactaacaagttataagacggcaccatgcactttaatttcctctgaagacttccagtgccaccttataaagactaacatccccaatacagccttggaatactaatgacctgcctgaacaaccaggctaagctttgtaatttacaagtgtgttgcagtttctctttcaatatagggtaaaggaaatttcatagagttttgatagatcacgtaaattaccacaacaaagtgcggtgctacgtcttcattaaagtaggagatgataattatgcagccaagtagtgtggtctttctggctttaagttatgaacattcaatagtgtctctttacttgtgcttaagttggcagttgtgagcaacatataatcaattaatcaataacccaattttccccttaaagagatggtgcatcatttaagaagaaaaggaacaacaacaactaaaaaaaaaaaaaaacaaaaaacaaaaaaaaaaacaaaacagcaacaaaaaaacagagattactgtatgattttatgaaaagagctgcttcagcaaagaaactagcttgaaaaaatagaaacaacaacaacaaaaaacattgaaagcttcttttcagggatgatgattttgcttaactaagccaaaagtgaaattggatacaaatgctcaggtcctgaagcattttattattttgctccagctagaagaaaagcaccaatttgggattgctggtaggaacgcattgtttatattcatgattaggagtgcgtaagcagatttatctaggaagtgcacagcaaaaataaactagccctaaaactcacagcttaaaactaattgattctatcctgtttcttacaaatatgggatcctgtactcaactgcctaatttgtctcacatgatgtctcatcagtacatagcaatgcttctggtgtgatggcgcttatggccatatggggatgaaagtttgggcgactcaacatgttcaatgtatttatttctgtatctttattatatctcttccttaaagtattcacttacactgtgataatttagatagtcttccattcttattggttattttatttatttacatttcaaatgttatccctcttcccagttaaaactccctattcccttccctgtccccgctgcttctataagggtgctcctgaacctacccaccctccctgcctaagtgccctaacattcccccatgctgggtcatcaagactgcacaggactaagaggatccctttgcattgattgggagaagaaaactgccttattctgtcccttttgagtaaagcacaattcattgctttttcctgttttcttatttgtatgttgttcttttttatagttgttgtcgatcaagtgcgcattcagtgtgagatttggtaaatatttaaagtcagtagttaatgctgtattacatgtaacatacagatgtgggccagtgagatggctcaacaagtaaaggcctgatgacctgagtttgattgttcaggacccataagacagagggcaaaaactgactcctgaaacttaatgctctggcctctacaggtgcagcacagcatgcttgttcctgtaactacacaaatacatccacacatacaaataaatcaacaaataagtaagcaaatgtaaaaatatattagccatgttgtctttataataaatgaacacggcatatcttaaaaaaaaaagaaatcccttaaataaattgcttaattgattaggtaacataagacactctcaagatgaaactgctgttctgtataaagttattcccaaagtggaaggcgtggattttccttatttctatgtgaagagaaaaacctcgttctaagtaagtactgagaaatttccatgatcatcaagatcttgcttttcaaagtacagcagaacaaccatcatataggagtttgttgaaaatgtaaatccttgggccccactatttctgagttgacatttttagcaaagactgcagttggctcatatgcagacagcagtttaggaagtgttgttctggtttcagattgatgcccacacaggacgtgactttaaggtctgtgagtttcccttgaacatgtgatctagggtaaagaagaactggcattgtgatagctttttcaagtctgcttcaaagggctgagggcagtgccaggaggaccataaccatcaaagctttgcttccattcagtaaccctcctgagttgcagcctgcaatttcatctttgaagtcctaagacacgaatgtccacttcgttatatggaggaattatcattctcagtccagttacctgtcactaattgtgattcatttgctatgattttgcaatgcacataaacactctaacaagctaaactgtgcccggtatgaagagaatgataccacgtgtattttctgtatcccattctctaactaagagcttcaatggggtcatgaaaaaacagtgcagggaacagcaaagaaatgataaattctcctccagtgagatgtaggtggaagtaaatgtgagtttggtttttttctgccatgacaactttattggagcaaagtgtattaagtttaagattctcttcagctctcttgtggggagagaaacaaaggcattgctaatttcttcttatttatctcatggagacctgtgccgttaatgcttcatttctctgtaatttgtacagaacacattctcaagcataaaacccttcctccattagtacagtggcactaactgcacttcctatggcctttaacttccctttattggaggccagttgctaaaggatcaatcagaagcaagctgaaccaatcacctctaattattaggggatgagaaagtgatgaagaataagttgagagccattcaaaggaaatctgacatgtcaatgcattctcctaatccaaatctccattcctttttggctcattatattcccattgttatccagtactgaagtacatcagacaactacaaatggtaagtccaacaccatacataaaataactttgaattgctgtctaagaagtgctgttttcattgtaatttggacctctgatttttgaagcagtcttgaggcttttttttttcttttttcttttgtattgtactgagatttatgttaagcatcgggctggaaaagatttctctgttttgtttcagaagtctttgtagaacagaggactcatatcccacttttctgataccagtgatttttcttgcaaaaatgatgaattttaagagtaaaacaaagctgggtgtagtgactcaggcctttgactcaagtacttgcgagtctgtgcatttgaggccagcctggtctatatcctgagtttcaggatagtcagctctacattaaacagccctgtctcaaaacaaacaaacaaacaaacaaaaaaacaaaaaaacaacaaaaaaaaccaaccaaacaaacaaacaaacaaaaaagtataaaatgagaagttgaggaaattttcttttcagtgaatcaataatcgatggctaactttctataaataataaattttagagattttttttcataaactttccacttcctggactactctgaccttgatctttgtggtttaaaactagtgacagcaacactttccttctacaaacaatataattaaactcttgattgaatgaagaaacatgccgttggctgtgtgtgacattttattttgggaaccttctgctagcagaagctaatctgttccaggatagaaaggtcaactagcatcccatgtgctaggtttgccaggccagcatctgggagactttctgcatggatggcagatctaactagaggtggctgacagttcccatgaatgagtgaatgatggccattcctcctgtccggtccttttgaccaacggtttctgctaaccacattctgtgtgatgagttaccaaagttggaaatcagccacattgatagacagtcaaatttccacatctctccctgctctagtaaattgcctttattgttgttggtttgtttttccattggaaacaagatcaggaatgatagaaaccttccaatttcaatcaagtataccttcatgcgatcccaggaagaggctaaggaggattgcaaagggtgcttgaaccctgcaatgaattctatcttctgaaacggtgtgagtttttatctccaaaaacctgtgcttgtgttactgttgtggattgcgagctaactctttagctcaaacacctcagagagactttaaagcaaaatattgtacctcggaataccttcaaatagtaaaagagaaggctgaatctgtcctttcaacccttttaagggcaaatggagacttggagtaaaattaaacaaaatgtctttttgctttttaagtccaaaatcatgagccaagaaagacttcattgtttatgatttgcgtagtcaacctctttccagggctgtcttgcaatctagtgcttgcaatccagtaggagattgtaaatcaattagtttcaatttactttcaacaagaaataatgacttttataatatttttcttcatgaccttgcaacttcttctttgaccccacgccaccgccgccaccaccaaggagcggaggccttggcttcttgggatcctctagttactttggagggaatattgtcctggacacttctgtcttaagcttccatcatttacttattgagccctgtcatctactcttaaaaggcaaagagaaacaaaaaggctggcagggcaacagttaggaactaattgactcaaagcagtgactgttttctatgatgagcagaaataccaggccctgagattgagtggatgtctcagatggacattgaacttattcccaactctgattttcttcacagattcggagacttagtttggatgataatacattttctttcaaactgaaaatactagagatgtagacactttagaagcaataaatcacgcttactcatcttatgcttttatgctgagcacagtcgattctagaaaatgtataggtgactgtgtttgcaaacagattaagttagaagttgcctggaggttaatttcctaccatgtgatatgtctgaagctgggtccatgtcactttctttgcttttggctctgtggaaaattaatgacatggtggtattcagtgatgggatgcttggaagaggagctctgtgttgtagtgaagtacagcgctccctatcgctgctgccatttgcttcaaggtggctcctactgcagtagtgtgttaactgcctctctcattcattaggtgtggagacaaggagattatagcaacaggcaacaaatgaatttcccaattactgtttagtgagaaatcaagagactgcttattaaatgaataaatatttaattaaaacagcattaatatctatgaaaggaaaagatactaaaagatactattctccttcttaaaacatccacagatgggtgtttgaggagtcctaaggatggtgatttaaggaagagctatgggtagtggagtacatgaagcctgtgatggagcaatggggcagtgtgaatctcgcttctggttgcaatcaattgctgcttctctgctgttctcagacaccacttcataagaaagggctcatttccaatacctggaaatctgttgtctgtcgggagtcagcaattttattcaagcaagggcctcttcattaatatttcagtctttaaaaaccatagtcagggtatttaattttgacctgctagccaaaacagccacatgctatatttaaattaatggatgtagttttgctctgacacagcatcatttatgaaaaataggatatagttttggttcaaagttgaccagcaattaatttagatgatgacctcttggtatcaaactatggttagaatgcaacacattgtttttgcagtgttctgttcaaacgacagcttcttccagtgctcacaatcacctaaaatttctacgtttcatatccttagtagtgtctatcatttctatgtttatggcacggtaggaaaggactgcagtttttgcacacttctttgttcacgatgttagtactgttgagcagtagagtattccttttggtggattcctgggaagatgcatatcttctctgtttcccacgtcctggtccacaggtcatactgctctgtcttggcttttcagaggaaaactaatcttctttatttcttggctcagtattgatgatagtagtggagctcttctatctcaggctgatttagcaaacccagtgccagcgtatggctgcttctctgactcaacacaagccacccccaagaagatcgatggctgcagtgtatctgaagaggtcctttgaatccaaaccagcaggacgctcccactgagaaggggttgaaattggatatacaaagagaagcccgagagtgtgatggtgtgctgtgtgaattataggtcttcctccagcaggagaggcctttccatgctgctcagagtcacagacgtattgaccacagaggctttgttcttgacttttttgccccctttggaaaggttgtttgagtccagatggtggcctctgcacatgttgatctttacaagttttagacactttccatcctgaaagtctacctgtgactgttatgggagacagtggaaggtgaaaggtgaatttcttgtagctctaaaactgtatacattctagttaggtcacacacacacacacacacacacacacacacacacacactggcaaagcagacaggtaagatacacacagagaaacacatacactaacatacccaaacacacacactgagacacaaacaggcacaaacacacatttctaaggctttcagtaagcacttctgtctcatttctaaaattattacaagtctcttgaaccatttatccctattgctttgttttttctggacaagttcttaatgccttagggtctatatttctttctttttcatttagaattggaaagtagttgttttgggaggtggtggtgatttgtcatatgaatgggaactgaaggcacatattaatttttaatctcaaagtatgcttcagctgctaagagttgtttcctttagctccctgtgttgtcccataggacaatagctctgccacatttacatactccacacaggtaaacactgtgcaagcaccactatagtaatcaaatcaaagttacttagacttatacgtcatgcctgacccgcacgggagcaggtatttttccccacctatttgtttatgatgagtaggatacccaaactattggctgatttgttaattgtctaatgtttgtttgtttgtttgttttttcacttgacacgagtagtcatttgggaggatgcaatcttgactgagaaaatgccccaatcaggatggtttgtaggtaaacctataagactgtttcttggttaataatagatgagggataaggaagccgattgtgggttgttctgcctctgagaaaatggtccagggttgtacagaaaagcagactgagaaagctgtaagaagcaaaccatttgtccacccatggcttctgttcctgatcccatgtttctggcctgacttccctcagtgatgaagtatgatttgagggttgtaagtcaaaataaacactttcctcaacaagtctggtcttggttttatcagagcagtagaaactttaactaaggcaatgaggatgtttattctctaaaacttttgcctgcttactctttggaagatagagttgaagacagaagctctggtcttggttcatatcctagtatctcttcagaaaatatggtcactgatcttgttagacatgatggtcctataacatgttatatacatgtatatatatgctacaataatgttcatcacaatgcaagcaaaaatgagctgttattgaactctgatgtggttgaacagatttgtcctagagaaagcctttccccagcactgaatactctgcaacttcctggaagacagcaaatctttctggtaaggttgcaaagataattcataacatttcttcacatgaaaaacaatatgagtttttcttagtttttttttttcaagatgaattagaacatgctttggtttctcaaaaactatgacaagcgtacagtttgagttaacaaaacctcgggcatggagtggacacagaagagacagatgagtgaagtctgtgtagggtgtggttggagaggagggatgacttgtcttcactactatcacaagaaatacaagtatttacacacacacacacacacacacacacacacttgtcaatggctaactaactatagctggtcaaaagcaaccaaataatgacccgagatggaaggtagcaacaactgtggtcacattatcacatttttatggatgaaatttttacatacactgaaatttcattccataaatacgtaaatctctatgagtcaatttaaaagttagattagaaagaaaatcaaccactaagtctacagaaaagataaaatatgatccatcaagccaagtagaagaacacttacattaataatgtgtcatgttgaacaatgtgcagatttctgaccttttctctgttagaatcaagcaaaggcatctacaaatgataacaccatagaatgcatgtcatgtgcttttattttattttattttattttattttattttattttattttttcttttgtattagatattttccttatttacatttcacatgttattccctttcctcacttcccctccaaaaacttccctatcccctctcctccactcctgcttccctgtcctggcaattcccctacactggggcatcgagccttcacgagaccaagggctctcctctcactgatgtcccacttctgcctaaattactctgtcattcctgtttgtggaggaatgacaccattatctcaaatgtaagtattattttgccactcccctttttcttacaaaccctgccttagagtttgtaaatagctgaagggaagaaagagaacatttttactgtttaggctgtgtgtgggggaacggggagttcatagaaagacagaaggataagactatagagcagtccacagtcctgcatatcattcatatgaggtcacaacactgaactcacaggattggcaaatgtctgaaatcatgagggtacaggctggagatcttcctctgtcatgtcatatttaggttttcttcaaattccaatgctctcctccccccaaaaaatggtgtgttgaaaatatctgtcttaaaacaccagaagaaattatagactgaatatgcactgttttcctcaagctcccatgagagtgcataacattacctccatattactacatacctcagtaatccctgactacaactcagtaaacatacaaatattttctgtgatacatattcaggaggtaactatactagattcagcctggttagggttgagatcatagactaataggttcttggtgctaacaaggacttccttaaatacatttgtttttagcagatgttgaactaattgtaggaaaatagtaccaaaacaagaaaaataaaaatgtaatgggcaatattaacactgaggcttaatccataaagcaataataacattatcactaaaccaaagtttgaaagataagggaatttgtttacccaactttaaattttttctaatggtgaagaaaaggattcctaacggagaacctaatagaaaacattccttatagtttctgagttgtcttcaaaaatatccaaacagtatttggagtatccaatgagagcaggcagtaattaatatgtgttggtaaatacaaaaaaaaaattagagttcagagggtgatgggaattcatggtagtatatcacagatatgatatttgttacaaaggaaactgaccagggactgaccacctactcagtagctaccactttctttaggtaatagaaaggatgttatcagtgtggaaaggaccatctctaggatgacttactgttcatcttcctcgaagatcagccatggatgcacacatttaactttctctgtcttcatgacctcagccactaaagcaatgtgtccatccatgctaagctatgtccatatgtttgtgcatatgaatgaatgaactcttggagccggcgtgaggacaaactgacaataatgtttctgtttgtggataaaaaaaaagcaattcaagtgctaccgaattagtgtggcttttattaaatattcagcaataatttatatcttacatattttagtgagtcaaagcccttgatatatcctaaaatataacactctcaatttttaaaaggagaagtttaattaggtaatggttgctaagagcttcaagggagagaagtgctctttaattgctatttctattctttttgcccttttataccttctcaaagtctggaagttgcttagcagcctcagaaacagtgattcctaacgccgctgcctcctctccccaatcgtcttgctgtctgggtgtgcacagcaaagcattggactcatttgctctggaatcatggggaagtaggattgatctgaaaggattctttaaatgaacctaaccggtctctctgtgctttgcaagagtttcctggcagagttctattttagacctgatggaatctcagggcatagagaagctttccttccaaaatgctgtattctccttgctatgcctgtgcctttttaggctcatctgcacatcccccagaaccctgctaaacaccttggtgtgactagccacatatagggtgtggctcattttgctcttctctctggtcacatttctcctgagaaacagttcatttgtgagtttgtttttactttacagcatccttcttacatattttactgcacaagagctctagtacttgataaatgtgtcacctatacttgcaggcagtgaagcagtggttataggaataattagcaaattaatgagtactgaggtaagcagtgctttagtgagtattggatgagcagaactttagttatgcgtcttccttggcttctaattaccattagggactgttatctaggaagcataggtaatttatcccacaggacttattctcagtgaaaccccctttctagcttagaaacgtaacctctatataatactaaccttttgatccgtagtgctgaagacatcactgggccttggttgtgcaggtgggtagtgccagtgaggcgtgggcgctttcgccttctttcacaatgcagtgtaaaccttttgagtatttggtccttggctggtcaccgaggcatgtctctagtcttccttactctacaaggctcttgtatgttggagatgggtatgtggagatttctctatgatctctcaaagtaacagaagctgttacgggtggatactggggatattagcagctaaattttatattactgtatagattttctaatatttgtggtgtgtttgaatatatgtatatatatacatacatatatatgtatatgtgtatacatatatataaatgagtgtatatacacacacacacacacacacacacacatatatatatatatatatatatatatatacctgtttactcatttatatatatatgtacatatatacaaatgtgtgtgtgtatatatatatatatatatacatatatatatatgagtaagcaggtatgcatgcaaaaattctcctttgacacttattaacacaagtatgaaacatatttgtctgtgatatgattgagttttaaataaatataagcacaggtctgagtgtgcttgcttcctttcctctatccccagcccacaggtagggtttaaacgtgtagagtccactgcatgttctgaatttaaattgtacagctcagagcatctttggaatcacatagaggagggatgacaagacgctgagatgataaaggaggtgccagtgatcggaagcaatttgttgtttgtatgagaaatgcagcgagttttgctaaaaccctgtagttagcaccattatctttctccccacaccaggtttgattgtgctgacaatacacctgtggcttttgatcaatggccaggctctccagcagtagtggttcccttgtcagaaagagaattttaaaaatatagcaaaagccagagaaagagcttaatgggtggggagttatggattgccctgttttaggtctggtttgttcttccaaattcctagaagattttatttcccaaagtcttatatggatgatattaagagactggagattaatcgacctgtgatgtttagatgtggggcagttaatagaataggtcattaaggtgattatcaagattgacttctagtggttttaagaagagggggagagcaaattcacaagagacacaaaggctcccacacaattctatgcagcaaaggggctcctgtcagagctggatcctcctgtggaaagcattaacttcccagacagatgaaagctaaccttcttaaagactaaaggaggccaactcagtgatttcattatagtgatgcaagatgactaattgacaacaaccataggtagactgaggcagcctagattccaagaggtttaggtttctctttaaaaatattaatttttctgaccactaccagaaggcaaatactaaaaagatcttagacttttatgatgtttatgatgtttcacagaacatatgctacttgtgcagtcctggtgttgtccatagtttatgctgcttcatgtgttattagacaatgcccacaagtctgtgtgtgtttttttacattgtgtattcctgatgatatggcagaaatactggaatgcatgcatgcaaccatgctgacttgttcagtgaaagaacagagcatctttgaagttgtcctttttttttttctgtgttacatatttcagtaattagatcatgactcatcatttaaatccaacgccactttctgtgaatattttagggaagacaaacaaaattatacttttaccttctgaataatgaactcaattaataaggcctccttaattcttggaatgttgaggagaaggggtaatggtggcagtttcactcttccttaaatcttctttaccacactagaaagacaataggacttcccaacaaggagccagggacctgggattaaagcacatttgagtctatagcgttttcttagattttagactcttaaagtaatttttgaaacttatgtcatttagtgaagaacctatagagggtggatacacttctcagatgagtttcggtttctgtgaagagattgtttactgggattaacttcgttcttttgaaagcaaaagttattgggccctttgcttttcactctgctttagattaagacctcaaagctgctaagagcaggtgtcctttccagttttctttcttcctcagtgtctaggaacatggagaaatcaaccaggtacatgctatgcatttacatgaagtcattggttctacatgtgtctggataaaataaaattcccagatagccaatcttttgactcaaagggaattaatgaatcatttataagtttagataatcagccaatagaaggaaaaagaaaacacgcaggttctgtttctagtataaaaaacatcttaaacaagtagggctgagaataaatgcccaaatcagaccctttctgtgttactggaaagtttagtacaaccattgtcatttaacacaatatgctaaattcacctggtgtgtacagtggctggggagaaaaatatcttactttctccccactctcccctttcctctcccctctgtctccttctccaatttttaacagaaggtgcacatcccatcctcttttggcccctctcatcatccttccttcttcatggtcttagcagtagcttgatattgtgaaaatctcataagcagcacagaaagaaacaatctgatacaaagctgctgaagaaggaccttggaggatgttaatatgtatttattatagtactttgcagcaatattacaggatcttgcatgtgctagccaagagctctactgagctacattcccatcacagatttaattatggctacctcagaatttgttaggatcttgattacaaatgtatctatctatatctatacacataacttgatgaggtcagggatttgtattcatcctatatgagaggacaccaaataatcagaagagagcagaattatcagtggacatagaacttaggaaaagagaaactacaacatacaaattcttcaatttgtgtctaaggttaaaggcattagcaagctaaatctatgctattttttaataatataatcaaataataaaattctagttctggtttagctcttttgagacatttgctaatcatatcacataattaatctttatcattcattatgaaatttcaaataactcttcagaaataagagcttaaggataatttttagcgtgctgattagtgtttaatgcaaacttatttctcagtggaccaactatgagagtctggagtccatttgacattctctttctcattcagaatgtgactttgagaagactgtgtatggaagtattgacttataacttgggtcagaaatcttcagtcccagtctttccagggaaactgtgatgtgcagaagggccagtgtccaagacagtaccaccctgagactatgaagacatcaatagagctatcttatgcttataggccagatcctgtccccaaagttgaaaagacttcatgaagaacactgtggtaccaaatcagcgtgacaggtagttctatagactattagagaagacttggctccccagactctcaggtattgaaactgttaaatcagtgaaatattctagatgcagaagccttctgggcatagcttaagctatgggcttgggcaagtctttctttcttggacttgtttttctccatctaatggcatggactaatggcatggactaatggcatggactaatcttttagatgtcaccaagtactcttaataaaatatttttaaaaattgtaattcctaatttgatgccttgtgtccaatttgtctttttttgaatgtccatatcacaaattgcagtaccatactgtgtaatgtcttatcatctagaaaggttcagaaaaagcacttttatgttaaacatgagtaagaccactgttctcagaatgttaaactgaccagctaaacaggtgagttctgagctggagaaagatagagaaattactttatctgtctctgaggacttacattgtgtagtaaaaaaaaataagtatgataaacttgagtttaccaaaaccaatgtgatagtctccccccgcccaacacacgcagaggaattcactctgacaacccatctaccatagacaaaactctgttcaaaacagactaaagaacttctctatcaacatagtctctctgtctgtctgtctgtctctctctctctctgtctctctctctctgtctctctcgttctctctgcctctctctctgtctctgtctctgtctctcctccctatcccctctgctctcatgtgtgtgtgtgtgtgtgtgtgtgtgtgtgtgtgtaagagaaatagacagagagagcttcattagatatcttcctagccaattcagcaagtagcaggtgttataagccaatgcattctcagttcaaagtaattggattaaatgaaacagtgaagcaatatcaagcagtcttcctgcttagcatttcctctggggtgtgtatgaccatagtgtctggcaaggctaaaactgtgattatcttcaggagagcctcatgtaacccagccttttaaggttccccaatggatagagagagaggatcatggagagtacaaggtaacctaagcctccaggacatcctcaagaggccctactcctctccatccttgacaaagtataaaaggctattcaatgattatgccatgtaagcatagctgtgaatgtaccacctagaggggctgtccattgatatagatttttttgaatccttggtgcaaattttgtgcttctggtggtgtggctgtctgtgacttgcctagaggatttcctggtgttctacctgcctttgactcctccatgttcttgtctgtaacagccccataaatgagttagttcacggagctgaatctgcagggaatcctctcttagctctatgggtgtcctcctatctgtggtgaataaatgttcctctatgtttgcccaggaaaatctctcaccgggggaagatgactgagtgaagttgtccgcacagagtcaatgcacagcactaacagtgtggttggattaattattcagcttcttacatcagcctctctagtggctacagtgtagtgctaacttgcccataacccgtgcttttcttcttaaggtttcctcctagagaatcaactctgtccttagctgttaaagatttttgcagaaaaaaaatgattgctatcacagtactttttgagtgaaagacttttttttagggacattacgtacacaaatgcttagtttcatccttattccctcctctgattggtgtaatgtgaaatcagattaatcatggaagctctttcctgtgttgctgagacttgtttaaagaggacttctatacattcctggttttggcagcttctcctccttctccttctccttctccttctccttctccttctccttctccttctccttctccttctccttctccttctccttctccttctccttctccttctcctcctcctcctcctcctcctcctcctcctcctcctcctcctcctcctcctcctcctcaacattctccttctcctcctccttcatcatcatcatcatcatcattgataatcttttcttctctcagacaatatatcccaaacacagattcccctccttccacactccctcagtttgttcttcagaacacgcctccaaaaactgacagacagctgaacaggaccaaagtggatacaatgaaggaaggcaatcaccctcaaatctgagctggacaagtcagtccaatagaaagaaaagagtcccaagagaagggaaaagtgtcagagatatatctgcccccactgttaggagttccacaaaaaataccaagctaatagacataacatctaagcagaagaactggtgcagacacttgctcgatccttggcagtttttattctaaactttaatggatcacttggaaacatagttgtcttttctaactggtgactagtaaaatgtacacaagctagcgattggagaggttttatttatttatttatttatttatttattttttatggattttgtgctggttaacatcctcttaaataatcttaccaaggaataatcaggaacagtcacgcttctgtgtccctttctgttttgctaaagctaagcttatgtaccaagttagaacatcaatgacattaaatgtggagacctttgctactttttgttagagggcatccctatatttgcttgcttttattttaaaccgtggaaatctgaatccagatagaaacaaaattagggttttttccataccacatgctagcatttgcactgattttcataggaaaaaaaacttcaaacagaacaaaataaaaacatgtagcctatagccattcctatttaaaatgattggtttccttggctaggtaaaattctgcatgattaaattgccaataattctgacatttgggtttttgcatagattttccaaaatttaggtcctaagttgttatggtaacttttttttaaagaaagtttaattttaaattacagatggattttgctgggcattagcaatttgtgtttatttagaaaatagagtgctcttatttttgtaaatgtctcacggaaataactaaatttgtttataaattgagactactaaagcacaatcgttgaagccatagagaacatcttgaaatacagttttaagtggagaattttaggaaacttacataatatcataactcaaatatatttaaattgcaattctctcagcctttatactcatgtgctgtatacacagttactctaaacaatgtaagagacatatacagtagcccctagagttatgaatttttaagtcaattaatttccatgaagaaaattgagaatggctgtttatgtctgtatatggtgtgatcctctagttggtgcatgcatgtgtgcatgcatgtgtgtatgtgtgcatgtacacgtgcgtgtgtatgtttgtgtgtgtgtgtgtgttgagttttctcccaatccttgtaatataggaaatgaacacttatccaaatgttgagagttcattcacaccgcatctgagttactaggtcctgggacagtggatataggtatttttctcttttgtggccaatttatttaaatataaaacaatggtgttagtcttagtaggagtttagagtgacaaagacttaaaatttcctttgagagtggtattgctcatgcctagcatctttgtgtatgtgcagaaaaggagagtagtgttaggggctgctgagactatggggagaaatgatgatacattgaagagctaggtctagggagagaaatcaaaatactcttgaaagataggaaaacattgacatagggctacctcatattttttttatttatttgcatgaaataaaactagaattataaaattcacattctcaattgggatattatatttgttaatccataaaactatttacattgtatgtggcaagttgtagtcatttttaagagttagactcttattgcttccaaccaagaaaaataaatgaattcagtctagaattggcaagagtaatgaagtaataattgtaaaaattgttggagtatgtcttcctgagaatcatagtctcctgtatagcttgactggccttgaagaacagtggtgacaacagagcctgatgtctgttgcacctttgagtctgtcattattttatagacaagatctgaagctctgataaccctggctaaaaacatttttaagaaaagaaagttactttaatattatatattattgttttactcatcaatagttattgcttatggttatatttattcaatggaaaacactgtatttgtattggatacaaacatggatttgatatccttttctttaaatatattaaatgaaattaaaaaacatatggggctttccttggggttgatttttcttcccctataaaatgagtttctgtggttcagagacaacctgacagatcaactaaaatatgaaactgtgagtctgtgatctgacagatcaactaaaatatgaaactgtgagtctgtgatgcttagggcttcttgcacctaaagtaggaattattagaaccagttctttgttcaatgcatgctatggtttgactaatgtcgaatggttgctgtgcatcagaaaaggaagatattattgagcttctctcagtttgaagaaggcaagtgaagtaccaagcaggtattagcagagttatttaaagctgcagactttacattagggaacacactcagataaaactaaaaaaaaaaaaaaaaaaaaaaaaatccctgagaacagcttgaacttgtagcctctcctagaagcttgatacaagttattaattagaaaaggaagaaggggggggggaacaaatgatttcttaagtggaacaattagtgttactgtatatatgagttaaagggcttcattaagaaaataatcaaatcatgtttggactgtagtgtgctgtcattgtgaaattgtaaattgcctttttatgactgagcttggatcccagaaatagcaagaattttctattctaaacatttgcttaactaaagacatgactgttgatagagtatcaagaaaagaaagacctttccatcctttgatataaacgtagaatcttattttggtggaagagaaccttattaagtagtgcaatgttactaagaattaaagctttaatgaatatgcatctatgtagttccctggacagaaagtgaataatctaacatcaaagcaattcagtttgaagagagggcatgaagaccattgaagaacctgactaggtgtggctatgccttgttcatgtattatatgtattctacataatggatttatagctctactctttctgctttctgctttgctcattgagacatcaatgaggtgccttcagatctcgtgtaagatacaattagctcagaggtttcaaactaatgtcaggatcgtatctaaaaaatttaaactccccttgtctgtctcagtaggttatgtacctgtctctcttgatgagcaggatcatgcctgggacccatttttttttattagttgtattgggttcatgttatagcagggtgttttcctaggacatttccatataaaatgttaaagttgaaagagatatatcttggaaatttaacataagatattaggttaaagtttatatagtaaacagtctccctgacccattgggattaacttggatcaactttgggcagaacacaaaactatctgtcatcttctcatgagttatgtttatttagattaggaactaaatcagagttcttggtaagctaactagcaaaactacagacgacatgaatgtgtaatataagttccatgaatgcatgttgaacctcatgactactaccctgtgctgtacgccttttgaaatatttacacttggaatgaaataaggaatagacatttcttctatccttctactacacagtcagtagataaaaaagacaaatgaatagaaacaagggattatgggctgtggtgcaattatttataaaatgatatggattcaaaaatagagcactgactttcaaacttcctttgtctctgacccacatagaactggaaaagtttcataaagcaatatttaccttacttccctgcactgactggtgttatgtgcagacatatttcttttagaatttgaacactggtgccatgaactattacactgatttgataccctcctagtggatcatatacaagttggaatatcctgagaacaaggaagatgcatatttgaactctaattaggaaatgcagagaggaggctcaataaaataactatgattccactttcctcctaaaaactaaatctaataattcacatactcgtttgcatagcacaaagttatgaaaagactattggttctaaagatatgatagcaatacacaaatatacctaaagtattattctctaagccaaataggctgaattttatctcattcacctttgccttaaaatgtcttaatcaataaagtgacataacctgctttttaatttatcaaggacataagcaaaaacatatacaacttattctactgagataaacgaggtcgggggaataatttatagactattttaagaaccaatgccttggaagggatccagtattcaggtgttatgatgacaatggtgaagagctgaagagagatttttggaggtaaccaacaatgcccagttcattctgagagttgattgtaattgtcaaaattgagggtgacttacagggtcctgccctgggcctgtggacagatgggttgtgactttaatagacgaggctgacagataaaactgagtgggaaacctagtagattcaagttttatataacattcaatttttatattcctgtgtgggaggcagatccagagagaaaatcaggaactttgactcttgagtctttattcttataatggtcacagtttgtatttttaatcaaaatagaatttccatgttttaaagattataaatgtaaaaaaaaattgaagacatgtacatagaaaagatcgataagcaagagtaagtggggataagagttcagaaaatgagggtgggggtgtggatatgaccaaagcacattatgtgcatgtatcaaacactcacaatagaacatgttattttcttttcttgatctacacttataacgtgcccataaatgaaatttaaaatgtcctaaggcagtctatcacatcgcatataaattacataataattaccctagattttcacattccttctaaggtcttcactgtaacataatatgctgtgatgaacacagggttcacagaccctgtctttttgtctgtacccaggtcatcccttagaaaagagtcttagcaaacaaattacactttcttgagtgaaaagagcagaaatattatcagcttaccatcaacagacaaaaggataacagttaattgttctccagaaatattgtacaaatatgcagtctacttactaaaaatgtatagcacttcctatttcaacaaatcccattcatttgcatgtattacctgcagcagaatagtgagactattaccatattttaaatagtatgcttttaattattagaaggacaaattttattaattatttcttatcttattcatgtctcgcaatggaatatctatgaattatctattatatgcatttcaagcttttcattccgaatcttgcctctcaatgaaatgtttgtgtgcttattctgtcttgaattgcttttatgtttatttcctgagcctatatactagatgtattattttgtcacactaacaacagataggtcttaaatttatttgattagtttaaatttttaaatatttacttatgacctttgaattttaattttctgagatccaagtcaatatccttatgattagttccattaattttatacttacaatatcattaagtcagagggttacttttgccattatgtttgtgtttcatatagttattatgaatttatgtttgccctttcagtactgaattgttcttgataatcagcagcattgcaacctggataacaaagtcttcctgaccttcgccccactgccctgcaatcattctcttggctcttgtgatttttctttttccatggatgttttcttcttttatttcttattttttctcattggaaacataatcagcttgtgtcatatcccatgtgcatttagacaaatctttcctgttacttgactcttactacaagatttacttttctgagactttacaattttcctccttccagttacgtcttcctctaattaaatatttattcagactgttatattaataaccatattaaagtctcttaaattatttagattgttttcctagtaagatgcccatttctcttcattagaagtgcaagtttattgttcaactcctaccttgcatctctataatgggctcatgggaagacaggatgctctgagatgagctgagtcattgatgtcgcctgattagtggtcatcagaaacctctgtgttctcaggagaagctttgtgtgtgaaccatcttttgctttacctctgtgataaatcacacgttttggaagtcctgagagcacactctcaggtgattagacatcaaatgggatgtcacagtcccataggccatagggattccaaggacatcaaaagttcttttggggtacttaaatgtcacaagataaaaagaaatgaagatcagaaaggaaggtcgatagagtccttttgatgtcactgagagcaggacttgtggtatgggaactacagatggggcagaagtaactgctcatgaaatactaaaaagatcagtttcatggaagcccagcttcagtttgtgcccaatttatgggattatttcagaaattaacttttttgttgaggaagtgatgaagaaaggcaattctaaaacagaacaaaatactattttgatggattattctaaatacaaatttttctgctgcatttttttttaaattgagaccatttaccttcgattagtaaaagcatccactttcgttcctctgagtatagacaaattgtgggattagtgagagacatagaccagtgtttccactattacagaaaactaatttaattaaataatttttcaaatagtttgcagaacagcttcccacatagtagtgaaacacaaaacagaggctcagaattcttaaagagaggatttttttttctagaagcccagatgcattctaggatgataaatgatgtgtagagcaaagggaaattaaatgtaaatgattcagaaccattgcttaaatttccctgaagaagtaaatgcagaggccaacagagaattcacttggctgtgtgctctgttttcttgtccccagagagtggatgtgttgcatggattagccccaagtcttcatttggaatgacaaactcttggaacagcgagttcaggtagagcctcagtagaagctccactttcaggctcggagccctgttttaaacatatccagagaaggtgtgattatagataaggccttcgtatttagaagtagtaacaggcaagattttacaattttgcagttgtaaattcctggaactcagagagttgtgtctaaactctaacctgtcttctcgctgaaattcgtactttctttttcttccacgtagcacctgtcagccattatgaatgtttacatatttacatagtgttctgtaatgtgttctttacttgaaaattactcctcacatactctattcatgttactattgaaaaagttattttatttgtatagaagaacatttatttgatgcacatgacagtgaccatgctaaaggcacatatgcatatatgtgcaaatatatacatctatatgtatacatagttcctcgtactcttccttgtgttcctctcccctccccctttctcccttacacgtttttcttggtgctcagaatgtatctctagaggtctctgtcattgagctacaactttaaacctgttaaggtttttaatttatcatttaatccttgccataaacttttaggttttttgtttaggtgtttgaaaagtcagtacactcaaccttatgtagtttgatctcatttagctatttcgccaatgagaaaactaaggtggtaggagctaaaaagcagcttttacatataaatccaagacttgttgatcagtgttatagattaattccgtttagatagattaccaaactagtcaacagcaaatctcaggctatttctcacattcaaagacttgtgttccattttacttctgtgatgggagcagagatataactttcagttttgttttcaaaatgattttaaatttagattccatgctggagagtcaccaggggatttttgataattctcatattagttttttcaatcagtaaattatgtttttccaggatgatagttcccttgtcatttatttttactctttttctgttggtccaataggctttttgtgaacataatgagttttgaaagaagtggagtgatatattaattaaccaagctaattagcttgaagagccttgagtttcaaaccccagagtgtatatattatttctaaaaatacatattagggagtcttgtttgagatggttggacaaaggaaaaagcaactaagccatccttactgagagaataaagtcatagtattagaaaccagggaagaagattagagggaattaaactctaaaagccttgtgggttttttttttcaatgtataattttacaaatgcacacacagttcgtgcaaattacccagcatggggaataggttaaagccactttcactggtgctcaacatccttaaggaaagtaaatttcctgtttggtagttgttccagacaccattttggaaactgcaatttttctcatgccataagttggggataaataaaacttggtgtttaaactccattttcataaagagaatggagcagtaagtgaaacgattctgatgaggcattggtaacaaaacatagaagaaacattcttaaacacacgatccttggttagctttgctctttctctaatgcacccagaaatggtttttgtgttgacaacagacaagccctgccctccagcaggctgcactctgccttaggacttttgaaggtgtctaaaagacaatggcaccatgagtgttagggcaagtggtaaataaatattgtgggaagggaggttaggaatttggggacattacaggagagttaacaggaaactgaataaatatatgccccaatctcttgtgagcacaagatctgtgtgcttctgtttctgtgtattaatgctaaaggaacttccttttctatgcccttgccctctctgagtttggtcacctcaaccaccagcaggaagcagacaagcttcctttcaaatctcaccaatgcagagcaaaggagacccacaatcttctttgggggaaagctttctctttttatttacttcagcgttactgaagtataactggcaaagccagcttcttaagatgcccataaagtgcacagtgtgatgctttgatccacatttgtttggacctcatttgtgaaagttcaccgcactattcactgtccaaacagtgtatagaaatagatgagatcttaggagtttagtccccagtgaatccattttctatctacttacaaaagtattatacacttggaaaagttcaactgacatgtaggattcaaaagaaaaactaaatatctcttttcatttgccaccctaaactaatcatgtttctccacttaagttgacaccttgtcaggtctggagagtatttgcaagggccattgacatgcagtgtgcaatgatgcacacagttgtaggaacaccactcacctggtcatctgtgctaagaactctcataacactaggcagaatgcagtgtgcatagcttcttagggcactgctgtcagagggtccaggaattaatatgcctgtatactaacaaaagaacctcagagggccttttcacttctgtcaccaacgtttttcatggatttcagtaaacctcttctctacattgttttgtacattgatatttctagtgaaggcagcttcttgtgggtgtgaagagagacatttaaaaggaggattctatctttacatcttacaagtccaggataaatgcttccgtggactgggtactgtgtaaccacagctcacaaacctcattctgaaatttctgtgtctggtaagagacttgattttttgatttattatttactttctacggcattccagttccatggtcataaagcacaccatcaccaatgaagcttgttccttgacaaatggcacttattttcttactataacacatactgagttttcctcatctatgtcctcccatttgtagtgaagaaaaacagctataatagtaagataatttcatcacagctttttgtttggattgtcagtttcctatcagcttcctgtaggtgaactgtgtagtgaagttaagctgtatactctgtgttatatgtaataagaccttgtcatctcctttcagcaattttcttaagcacagatcaaaatggaagatgagtggttaatggaggtgagtttctccagcactttttagcatttgtgctcatcacgagcgatctgtcagtgaatataaacaaaatcctgtggtgtaggcacatgtgcattctggaaatttggaggcaagattggctgtataagtttgctgatgttaactattgattgctgagggatgcttaggactgaagcattcatccatccaaactattatcatttgtttggtgtctgttatatgttttcagctttaagaaagactaaataattcaaggctacctgagaattactcagatttaactgtggttagtagggtttgcccatccaccacacattccctctgtgcttaaaagccactcactttgaaatccccctttgtatttgctcataaaagcaggggagatcatttccccatacagtagacatttggaaacatatagcaatacatttgtatgccacactgagtaggttctaaccacctgcccaaacaggaaagcagggatgatcagctgttgtctcaaacctgtaatcccaacattgagaaaggtaatgagtttgagggcagctgatgtcagtttgctcttggttttcctgtgtctacaagaggaaagagacagaaactcagaaagagaagtacccgctactcaaatcctacatatatcatgcaacatgtataaggtggggcatgctaaaatatctccatctctttatctgttgttatcaccaacaagaccctgtcccaactccccttccctgaataaagatccacaggatgctagataacttaaaatatatctcaagtgttaactaggacagacatataacaagtaattacttgtttattacagatactagtgactaatctgctgtttgcatttttattcattaaatataacaattaattataatgacacctaggaatgttgctaaacatgttaagaacacatggcaacaaagatatacccaggaatgcaggtctatggtatgagaaatcacgaataatgctgatacttatttgataataatgtaaatatgcctaaaatgcgtatttcaaaagaaaactattggcacttgtggaggaaaatatttctgtggtagagtttaatctgccattagataacaggataacttagcagaacctaaataatgaatattattttattgttgaatccattgaatctttggaactgtgttttatttacttcttgccacaatccatttgacctctttcacagagaaccatagctcctttacctcaacaaagttcagtgcacatctaattaattgtctctgagattacgattacttgaagtgctgcactctatactagcacttaacataagttacttccaatttaaatatggggatatgattaggccatttactttattttattttttgataaagagatggagatattttagcatgccccacctcatacatgttgcatgatgtatgtaggatttgagtagcgggtacttctctttctgagtttctgtctctttcctcttgtagacacaggaaaaccaagagcaaactgacattagctagagacaattctgtctgtgaagctcttatgccagaccttcaagttactgactcctaagcaggcttcaactacacacatttatttctagtttgccagtttctcagtagtgaagtagtgactgcagatcttttggaggtaggtggatctatttccaaggctccacctgctgagaggcagcaactgcctttccaagcagcctctgccaatctgtagggggcacagcaggaggataaaggagggatggagggatggctctgacagtcctgggctcctggggagctgtcccctcttccatggtcataaattaaaccaccctgcccacaagagttctgatttagttgcagtcactgttatttttttcccctcaacttcctaagagtattagaagaaagaagtttgccttggtgattttagtgtggatcatatttcacattgtaataatttccctttgctaataaccagcatggttctttctatccttacaccattgagtatcctgcagaaatgcaggtggcagcttcagttcaaggtagaggcttcaaggaagccagtgatgcgaagtgaataaaaaaaaaaaaaaatcaccattcacatcaacttccaagcagtctttgcataatgattacttgttacagtgggtcaattattacttattccccatgccccttcttttctgcctcagtgaagtaaaaatccccaggctgcattcagtgtctctttagcaaagtacagtaccccatatgaagtgtacagccaatgtccttgcatatcttactctatgcaaatgttttcttcctcgcttatatgtctgatatcatgttgctattccatgtgtgtaagagtaagacaacttaccacaacatggttatgatccactcatagaatcatagatttttcaaggctttctgtgttacatgcatgttgtttgattctgaaatagatattaaaaattaatatttaaatcttggagaggagggaagagaagtttgaagataagaatgtttgttactgaaggtggttcaacaatgtatgaggtgcagagttaataggtaaccttttgacatcttctccacagattggtttttcccctcgacatgcatatttcttcatcattatggtacgagtcttcaaaaaccaggctttttatttttaagacaagccatctcacactctattgaacagacaagagagattcaaatcaatctcccaattttaggctctgatgctctgatataaacatggagtttgaatacattgaaggaggttgtgtggttagaggcagataccttagtagaaagttaagggactcatcattgatgaggaattctgtggggtgattggtcagatttgattgtcttcttccttttattagccttttgagagatagtagaacatgttttgattatatttaagtccgctgtccatctcttccaaaaattaaaaaaataaaataaaaccttttcctaccccctccaattttgggctatattttttttaacccagtgaagagaatacttatattttccaattttcctgagagatatggtcttgcactggagcatggtcagcttcctagatgctgaatttttaaagaaaactgtctgaaaactgtctctccctctagcagtgcctgacaattgtcaatagctagcaccaggtcttgaagtggaactgcatggccaattcatatctcaacactgggatattgtctgacatggacttacacaggtcttggaatgccatcataaccagcttccttgttgtgtccaaaagacaccatttccacttattcatccataattatgacacttattcgttttttacccgatcctgtgcaataatatctgagcgttggagaaagctatgtgatccttttaggattaagcattctgcattctattactctttgctccctagaatggtctgtctgagcactggttgccagtgaatgtccaaatcttgccgtattcaaagattctctcttgattgaactatttcccttgtttgaagaatgactagatagtattaaaatattttgattatttatcaaagatactggttaaactctaatggttgtcatgcttcattttaatacagtgtcatgattctgcaaacctgctctgttttgtcatatttcatattctattgagggatggctgtctgaaaatacacttaatatgaatgctttcccatatgattttgtcatttttctaccaagcctttggaaaatatattatagataaatgatagaggtctatattagggataactccaatggggcagctaatgccagacttaaatctgtgtattatctttaaggctgccaaaatggtgctatgtgtcaacagttcaacttcccaaattcttggcaagagccccaataagtcaaaatcaaatatgctttatgaagcatacagattgcttgatagtacatatgtgcacattcagttctatgtgaattaaaatctgattggtaaactatggatgctttagagtcaatgacaggatcttggtaagtggctggtagaagacgaatagatgcctggtggactgaattagaatgattgtttttatatgcaattaactaagctgaaatatgccactatgtatcctaatatcaaaaaaagttcttcatctgctctctaagagtgacagttgcatgagtcaccatcatgccgtctttgttttttaataaaaagcagttcaattaggaaacttggaagatgcaatgatactcattaatgtttttttttttggtttgttttgtggggtgactacacatacgttctgactgaagcactgtagttgaatcctatgctgatatttgtgcatagtgagaaaaaacgggggatgcataagctcaatttattttcaccctaaattcagttcaatttggttgtgacaagaaggaaaacagtgtaaatggagaatggaatctgtttactgactcaactttccttagtaaattcagggattttaggagatttgtgtgcatgtgtgaatgtaactcattacaacatttatatatatatatctgataggcccatgttccattcagtggtagtagattatttactttggtgtgtttcatcatctcaacttatacactgacactcaattttgttggaaaattacaaaaagaccaagaaaataaaattttagatagaaaaaccgtaagtttgacatctctcctccaatctttgtcaggcttgaagtaaaactatgcactgcagatagcatcctacctctggcatgaaaatcttggagaagaggtgacaagttttatagaacctgctctagtcttatgcaggtatcatcgtcgtcgtcatcgtcgtcatcatcttgtaatttttggaaagttattagtcttaatacaactgtagatgacaaagtcagagctagttgtagaaagacttataaagtaattaaattagtcatctacacgtgactttccattcttcttgttcatgggactcctatcaaagctcatgctatgagatatacagtatggctctcactgaccacatgtctattttttaaaccaatgcagttataattaatttgtactcattcaaaacttctacatgttatctatgaaataagggcatggtccactcatctatgatagcagtactgaatccattcatcttttcccagaccaaacaaaattacattgaaagctaatgggatggggtacatgcagagcgaagcacttcaggttgttctcaaatgcactgtctcatccttgaatgacctaggttagtgcttttcagaatgtgataacaatgaacttattaaaatgcaaattctcccatcagaaactctagaggacagggcatagcaatcaattttaacctccatattaatctatacacaatgaagtctgaagcccagtggctcaggtttagacatgagtgggaggtctcaagaccactcaagccaggaacttgttacaattgcagatttatggctctcaaccaagctttgcttcatctgaatttctaggactaattttctgtgttttggcagacgttgcaagaaaatctaaaagtttgagaaaactactgttctagaaaagcggttctcaaaatgaactacatgttaaaatcactccagggagtttttaaacaatacaaatggctcatctccaaacatagctgagtttcctagtttttaatgtgcagccaacattggggattactggactacattatctttaaaagtcctgccagattcaggttcatgattttcaagttgctgttgtttctccagtgtgtattttagttctcaatccgtgacattatttcttaatccacattctgcttgattggtaggactcagcactcatccagcaatttagctgatgatagcttacgaaaaaggcttcattggttatatccttcacattttatgagactatgattttaaaacaatacaacacaaaactctagaggagagggcacaaaaacaaacaacatcaataaaaacccagatgcaatgtaaaaggttcatatccaaaccccaccattagtaagactggtccaaatgggtagtgacccctttgggtggatcttctcttttcttctcttttcttttcttttcttttcttttcttttcttttcttttcttttcttttcttttcttttcttttctttcctttcctttcctttcctttcctttcctttcctttcctttcctttcctttcctttcctttcctttcctttccttttgcatgcaatttactagttcagatttcccctctcccagcttctcccagacccacctctgtatctacttaccttcctggcaccaccttctctcaaaaaggaaaaaaatcaagaccaaagcaaagctaaccaaaccaaagcaaacaaaaatgatacaaataaatgatggaataaaatccaaagggacagatttcatcaaaacaaagcagaaagatggaagcccattttataatggccaactacttctagacatggggcttgcacggagtttgatattgtcactgatatgccattgaggaaaagtgatgtaatctttagccactgatattaattataaatagtttcttggtaagaagttggtttatatgtcttcttccttatttccactgctgggaatctctctctctctctctctctctctctctctctctctctctctctctctctgtctctccccccgtctctctctctgtgtgtgtgtgtgtgtgagatgatttctgtgaattcatatgtgtattagtcctactgtgtttggaaaatgctacttccataatgtcacccactacttctggatcttacatttttttcctgtttcctcttcggcatacgtccctgagcctggtggggagggaggttaataaaggcatcccatttaggattgagtgctccaaggtctttcaccatctgtacattgtccagttgtgagactgtgttaattaccaactactacaaggagctgctggtctgattagtattgattgacagtctgatttgagtaccaacctagtgggtcagctgtattccctgacagaatgtaattctgctgtttggtggaggcacaaagaatgaagacaggattgaaagagacactagaaagcacattgggaaagaattaaaaccctgggtctgcaccaagaggtcaagttgacaccaacttttaagttctacttcattagatcgttgcttcaaacattagagccaaaatttttaaaaaagacagcttttggaggccatatcctaagaattatttcctgcagcacaccaaccccattttataatgatgaatacctgctctaagctcaatcgaattgatattgttttccaataaactctgctttgaaaaagaaaaaccaaaaaaaaaaaaaaaaaaaagaaagaaacagaaaactccaggtgtcctactaatacaggttttttcacctaaggtttgggttggagccaacagcatcaagcagtgggaaggcagaatgaaatgttccaaaactgaaggtttgtcttaaaaatatttaatgaaaaactttgagagctgccatgacatctgacagattggcaactctctttcagaaacacactatcttcctttcaattcccagacacgcagcctgggggtaagtcatcagaaataaaataaacaaggaaccaggggagagaaaaacagcatcctaggacatccatcaacagtgtgagccaaggttatggaggctattaaacagacaacaatcttttgtgtttatttcctctttatcagggttacctacctgagcttggagagctcagatagcagcaggcatattctatggggttggggggagcagtaaaatggagatcaaaacactgtatgttgatgtttggactgacagcttctactggctaggcaaaggacatctattgtatctgaggtcaatgatactgctatttaccaagccattgtggtcaccaagctgctgagactagcagtggacgatttcagtctgagaagaaagaccatggctttgcctgcagcattgctagcatgtgggctttggtttcaggtggccgattgggctgtttgctcctgcagccatcatcaaagggatgaaagaatgtgtgccctcatctcctcaggatactcagatcagggacaaactcaggggaaggcttaacagatgggtagactagctggcagggtacaaactctgcagcagctcagatgccacagccatcggagaagccaacagagcttttcctcctagcaaaattcactccattctggacatagggctcttttcttattccagaaactcggaacacccaagattctttcctcagatttggagtataacatcagcttgagtaacattcctgcctgaactctaggactctttatcgccattatttattttgtgtcctgcctgcctggtatctatttttgaatgcattctacccatgatccagaactgtgtggtttttcatacagtaataggcgttaactcaagacttatcacagattcatataggtcagactttacgtccaggcaagcaatatgaaattgttttccacaatctctaacactgtcaatcaactacttagtggaggcaagtaactttctgtgtattctgagaaagaaagagacttcccttctgagatttgggaaatcatatttcccaaaatataagccaccactactgagtctgatagactttgtgtttccgtgccaactgagccctttccagggtttcctgtgcattccattttataactgcaagagaaacaaatgctatcatttttacatcgttaatttgcatgttaacctgtaccacaataaattactacctatttatttataaaccttaataataaaacaattgtgagaaatacacaatcatccctgaagagacatgaaccctaagcatttgaaaagctagggaataaaaagtaaggaatgagtattccttccagatttcatgacaatggagtttcttataggatggtgattcctggatttatggtatgctagcttgttccttcaaacatcattcatgacccctttacaagggaaacctggaggttaattaataaaagattgtaagttcctgaacattgccctgtgatttagtccccatccttgttaggaaatggctctgtggttcaatattaattcccctagcccttacaattcttttgggattaatatttaatcaacagagtggttgccttttttatttcattatagaaatttttcaataaaatagaataggacattatgttgtaatgaatggaaaacatggacaaattttcatttaaaatcaataagttgaaccagcagtcattttataactgatgggttatctcaatttaatgaacagtaactaaaaacatattaaacaagtgcctgggatgaaatgaagaaggatggcatagcaagagactaattattatcccaccagtctaaatcttccccaaagagagggttgttttctgttaaatcttttttgtcagtgatagtgagtattcagtaaaatctctctaggttgaaaaaattcataagtatgctgctgtatatgtaacatactctatgtcagaggggaaatatactacagtttgctattgtggacaatttcagtggatgatgactttcacaataaattgtgtgcatgtgattttccttttgtaaaggcttttatagtatgttgtcaagttgagccagtatcagaatcactgtgagagcttgtgaaacacagactgtgggttcctttcccagagttgatgctttggtattatagggtaaactctttgaagttgatatttgttacttctcagggaagcagtgcagcatttggtatgctaagaatcactgcatgtagcatacatatagctctgttcttcttatggtttttattattctggtataagtgatttcattgctgatacatgtcctcatctagagaaagagcatgaagaccatttaataactacatggatgataccagcctgagcacatgcaaaattgcccaacactactcagatagaactgatggcttagtagatgaagttcacagagatccttcatcataaaggacagcaggccagttccgatgttggctttctttttccttaatagaatggcaccaaagacccattttgagcatgcatttgtttcctattagatgtaatcttatctgttgctaattagagttgtacagttgtggtttttggtcttttcccctttcatataagataggtgtcttcaagatggtaagattatacattctaattggagcaatccagtgctgctgcatttgactttatacaccacttatgtgatattttgattctaatactatttttatctgtggtttcatcaagttaaacaaactgatattgagctggttctgggtacatctggctatgctcaacattgaacactggtcagcattattgtataagacagtaaaatgttttataagaaaagtctaaaattgccatgcattttaataggctattggttttggtggggatgtgtacaggaacccattgtgagtctctattaaacaggatttcttaaacctgagtacaatttttcagataccaaagaacttgtttaatattcatgtaatccctggtggcagctggttctaacacagagctctgccccacacctaagaccagcagaagtttacatacacacacacacacacacacacacacacacacacacacacagaaaaatactttcttaatactcaagatggatatattgtaactatccatgtgttcatatgcttctacctcctttctctgatttattatactctacatgccctcttaaaatttgtaaaatacttatgagaaaaaattctctcttacatctcagatactgattatggaatgttccccacaagtgtctgatgccttcactatgcattgcattcatatatatatatatatatatatatatatatatatatatatataacatattctttaagatacactctatccatttcacaccaacaacctactgtatcagtaaaaaaatgttaagaagtgatggaggaaccaatcccactctatcatacagtgtctgtattaatcacccacaatagcacatgtgatactcttataggcagttttgagcaaactgaatgatcaccattcttgatgtgctggtactcagaatcaactcaactaaggaaccagctctaggctgtccacttaggagaagaaaaacaaatgttgagacaataataaaagagggatgtctgcattatgtagaaagatatacacaatgacatgatcttgactcagaaaagccatttgtactagtgactttctggggcaagagtattatacttataagaggtgacaattaaaaaaaaagacaccatgattaagatagagttgccatgtgcatataatacacatctcttttgaagaaaaatactctagactctacatctaccttctctgattatattccaacaggatagatataacatttcattttagtgtctctttctttctccagaagccattgtagggcttgctgaagcacacatagctcctttagatgctcattggctggtattatatcaggtggagccaggaaccacagattactgtttgctggcttgaaggatttgcccactttaatctatagtcttggttcaaggaggtagagttcagagatgataatcattggttcaggtcagtcgtttgaagggttctcattgggagttttcaaggctcaaagaacattcgtagtctatccttgcaaagtggagagtggatccttaaaattttctttaacaattcatacccccccattaagttagagagttggtggaagactcataatatgaattggctaccaggttataattctatttcatgaccttggaattggtaccttagtcactttcagttacttgggaccactgtatgttaagctcagactcatgagcccttagacatcagtctttaaagagaatttttttttctgcaaaaattcagtaataatgccaacatatataaataatcctatgttctctctgaacatagaaaagggccaatatagtaaatctgcccttgctgtttcaaggccacaatttatcttttaatgaacccagtgtgtctctatggtttgtttgataccactgaatataccatgcactgttgacaaacatttatgatatctctgatcttgaggaacactagccatcatgaggtaacctacatggctttctggcatgcatggtgccttcaatggtacaataacatgatgatgtcttcagttgttttcttaaagctactcctctgtcatgtgttactttgtaacatcatagacattattatctaagttttgtgcataaaatatatttgaacataatcagttattcttttagcatgcaattcagcatccattctgtacaagaaccccatgttgaggatgcttgctacataaatcataatatatgatcttccttttagactttttcaagaatgtataatgtagtgatagagagccaagttgcaagcacatgtatgccataagaaaataagttaaattcacaaagtacatcagttaggagtgataaaaatgggagatgagtacatttattcaattttcattagtttccatcatattttataaaccgaggtcctgagtatacatttaccttctctatagcttcccaaggtgcatatttttcttttaaaaacaagttgatataaccttgtgtttgggcaatgtaaggagagatgcatcaacatgaggcccaacatagtcttctcagtcaactcggttcacttagcaccaagagaacccactgatagttactgttcctggtctacttataggtactactaaaatataatttttgagttacatgtgtttcttcttgacaactaaatctttatttcatcttctacgtccatatacaataaaaacctatttaagaaaccttcttaagtgtcctgaaacagaataaatatattcatgcatcatcatgattactttattagttattaacatgtttccctgtatacaaccattattcacctgtctcctgtgctcattggactttgagttccctgagggtgaggaacctattttgttcttattaatgtatttaacattttctaacactatgcgtctgacttataattggttaggtaactatatatttagtgagtgaatgcatgactgaatatattaaataagtgagtggataaaaaccaagctaaaaacgattaatcaggaacatttattggacaaataaatgcagagtaaacacaattgttccagacatcatagacttttctttgattatattttcatgtcataatgtatttgaaaactgcatatcaaccaatagtaacttataattcagtctggccatctgaaatgattttcaaatacaacacaacctgtttttgtttagggactgttcagtctgcacatagagttagcctgataattgtgtttaaaattgtatagatagaaataaatataaagcatcaatcataatctcctaaaactgtgttattgaaatcactattgttgccagacaccaatgaaacattctattaagttttaagttaattgcacgattaaagcccttagatagaaaaagaaaaaaatatgcatacatgtttcctagtaaattagcatttcataaaactctttaataataattctattaaaattagttaaaactcacaatgcatcaaatacttgttgatcaagatgaattatgtgtataattaagaattgtgtaaattctaatgacccttgaaactgagtacaaagagctattagctggggtcagagaaatttagcaggagtgtattcaattgtgtgtgttcatgaaatccttaattttgtgctcagtgtcaaaatttgcataatatgaaagggggaaaatacatttcctcatttcctttcttctagtcagcatttgaggctgtgtaggatacctcaaggtaggataccttatttttacaccctggttaagttcacattattactgtttaatgactctaaaggaaacattttttttttaaatcaggtggctggcagtgagacaggtagttggcttaaatagtcacgcaatctcataacaaaatatgacttagactttgtagaatctttcctgtgcaaataaattcaattctatcatcatccctccccccattctcttctatcaggttcaagttatctgatcttctgccaatatccttaaccactttggagttgaagtagtgcataattctacatatggatctatttttattcttctatatgcagttatcaagtttgacagtactatttgttgaaagtgctgccttatttccagtgtgtatatttacttccttgtcaagacaaatacgatcaaaatcgtatcttgtaggatggataacaaaaatgtggtacaattattaagaataatgaagtcataaaacttgccggtaaacatatgcaatgagatacagttgtcttgaatgagttaatcccgttttaggatgacaaaaaattcatgcctcctcatgtatgtgtacactaggttttaagcttcaagtatgtgtatttcagtgagactatcctcagagtttaggcagccccaaagagacaatggggaagtaaggagattcaaaggaaggagaaataaaatatacgattttattggaaaaagggaaactagactaggaagattaaaatgagagcaaatgagatgacaggataaaggagagaatttaggttggtatgacaaacactgaagttcttttggaaagtcatatactactctggaagccgcctaagacacgtatacatatgaaaggaatgaaatggattttctgtttaatgggggagacaatgttctaactatatgtcatatgctatcaagtaaaaatccccagtacaaagagttggtcacatcttgctgagttgttcaccaaaaagtcatcatagccctgccccccaaaaaacactgcagtctagttgtaatgttattgggtactctcaatatcataaacattaaggctctattgatgtagatgtaactttcttgtgccataaagcatgaagaaatcaagctagtaccaaacttgaagcttcaatcctgtactggctagttttgtgtcaacttgacacagctggagttaccacagagaaaggagcttcaggtgaggaaatgcctccatgagatccagcctgtaaggcatcttctcaattagtgatcacggggaaaggccccttgtgggtggtagcatccctgggctggtagtcttgtgttttataagagagcagaatgagcaagccaggggaagcaagccagtaaggaacatccctccatggcttctgcatcagctcctgctttctgacctgcttgagttccagtcctgacttccttttgtgatgaacagcaccatggaagtgtaagccaaataaaccctttcctccctccccaacttgctttttggtcatgatgtttgtgcaggaatagaaaccctgactaagacaaaccccatcaactattatttatagttttaaaggcatggtatataatcctgacagacaaaagtagccatcaatcttattctcatgtgaacactctaaaatgcagacaagataccatattttgataatttttgttatatttatagaatgaaaagcttttctagaagaaaattctggttaatgaagttaatagcacaattatgtatatgcaacgtagcttaaaatgactgtctgtcttaaaatagatgtgcctatctcctagatgataagaaagcacattctgtatcagtgattgcctataaggtatgcctgaaaatatatctgatggaggcataacttagacatccttttcgtttttgagtttgattttccatgctaattgaaaacaacccaattaaagtacttacaagacacagttaagaatttatcttggtgataatgcagggtgattcctctatgataatttcaagtataactgggactgcacatatgacctggtttattttgagtggttagaatatatgatgcctcagaaagcatttgaatgtataatgcacatgtgtgagtagcctgtcctatactccgaactgtccactgtaaaaatttcattttatctgttgtgcattcactgtgtctttttctctgcctcttcatccctcaagaagtatagagaagcacatgtttaagtaggacttaaacatttcaacatttcaaggaattatcatatttttccttctcttttaagagatgcttaccaggaagtcatcggagagaactcttaaaatctgtggtaggatggtatattgtcaccctctatagtagatgacatccagtctgatgtggcagggaaaagactcagcaccatattctgcccaggccaccaagagtttgaccccactcatgttagtatatgaataacacatattggattttttgctgagagcaaagggaggggaggtagcaagggttgtggaggacagagaatgcctagaaaggatataagacaggggtctatgagtgaaatctccaaagaatcaataaaaatactaggttggaaaaaaatagttgtctccattttccaatcttcctactaaaagtttccttctttgttccttgtttctcactcttttttttttattaatttattgattttttcacaacagaagtattttttaatttggtattttcttcatttacatttcaaatgctaccccaaaagtcccccgtaccctccctccccactcccctaccttcccactcccacttcttggccctggcattcccctgtactgaggcatataaagtttgcaagaccacgggacctctcttcccaatgatggccgactaggccatcttctgatacatatgcagctagagacacgagctcagggtgtactggttagttcatattgttgtttcacctatagggttgcagacccctttagctccttgggtacttgctctagctcctccattggggtccctgtgttctatccaatagctgactgtgagcatccacttctgtgtttgccaggcaccaacatagcctcacaagatacagctatatcaggatcctttcagcaaaatcttgctggtatatgcaatggtgtcaacgtttggaggctgattatgggatggatccctggatatggcagtctctagatggtccattctttcgtctcagaaataagatgatttctctgtttcattttatattttgaaatgcctgatgagtgagattaaatttcctctctcctttatgttgcattcctttgtatgttgctcttatgggccagaatcatctttaattaatgtttgtagagaggttttaagaatgaatccagtgataaaaaggagaaagggggaaagttgcgatgctgggaggatgaggaatactaatgaatgttaatcatgactgttcatgtggtgccttttgtcttcaaagttgtcttaagatgctctaattaatcatcttcctaaagggtggtgattcagagagttacagttagaagttcagttgatgagttataagccaggcaaaggatgcatgcattttctgtatagaggtaatgttatagggatgtattattgagtaaaatgatttgactcaggaaataacacacaattgatgcattatagccatttctttgaaaactgctcaaaatttatgagatggagtaagtaaaaaggagggaagggagttgagttatttgtaaacacacaaacaaacaaacagtaagagagttagattaaaccctatgaaaacaatgaagacaaaggaaacaaacaaaaaacaaaaacctatgcttattaaacaaaaacaataacctattgttattgaaggtgtgtgaagaaacttagcatatctaaaaacttaaaataaaagttttgactaatttagtgataactgtaaggccactaaggtgaacaaatactcttataggctggccatattgctgcatcacaatccatacttttgttcctttgtccttgccttgtataatgtgtcccagtgaaggatgcagacaccaagtgaagacaatgagtctttgatgcactctgctcccactacagcatctgtgtgctctttcattctctccctgtcttatagaagaaagcctgacttgaggcttcttcaggatttagaatcatagtctagagaagatgcttatcattctagttgtgttcaatatcatgcatgtcaatgaacataacagtgatgtattttggaaaagagacaatgtatgagcaatgcttctttatttcctgagtcatcttgtttccttatattatttttattgtttgcagtacattagacttgatggaggactgatgaattagaaactaaatagaacaaattctccaagaaaggctaactgtagagagtgaagtaatgctccttcaatgttcaaagtacaattcttatctaaataattcatttgctgctaattcaatagcatatttcacagttgagaagagctttctcagcagcatttgatgccaacccttgtgttcttaaaagccatcctttaatgtatatttgattacaccaccatgcaatgagagatgaggtattatgtggaattctctgtcactacctattatttgagtctttagtcatgggtaattagtaagtgttgaccctcattttgatttatcctgaattccacaggcttctaatgctaattttctgtattaggaaattatatgccaccaggacaaatgctttgcccagaaagacagttcttcttgactttggtaatataagacccttgatgggagaggcatagtaatgtgtgaattttgctgacaaaaatatggtattgacttactattccaaaacccagagacattcattcatctattaagaaagaaattacagaattaggaatgtagcattttcatgaagtaaatagatatgggcattctagagtaatcatagcttctccatgtcagattaactgcaattatggaaaatgctgtcagcaaaatggagagcagccattctcttaggtaagtaagtggccaaaatacacttggaaataaaatgagaaaaattatagtcattgattctgtctatctctttctcctctttttacttgacacagatttataaaatatttctgtagcatcaaacattctacattcatatttctgcaactgtgaacttggtgaaggaagaaatcctgctgagattacagagagcaaactttgttacactattactttaacaccaatgcagaaatagtaagaaaagagtgactgtacctttattctatcattgttaagagtaaatagatttccccaggtggccctacagttaagaatagtgttgtatggtctgggcagtgatcatgcaacagcacttagcaggcagagatatggagatctaagagtttgagacaaacctgctctacgaagaaagtttcagaaaccctgcctcaaaaccaaaccaaaccaaacaaacaaaaacaaactaacaataacaaagagaagagcattgtcagtatatgcacaaggggtgatctttagttactgcttcctttggatctggctgatggattcaaatcttaccatagtctaacatgaatgtctgttcatctaatactccctgtgtccttatggttaaagtaaacatttaaatgtgataaaggtgttatgtaatcctgtcaccatttgttatctcttgtaagtttgtaaactatagataagatcacataaaactaagcattttgcaatgtcaccatggaggtcaattcccaaagttgctaaaacaattaatgatagttatgcagtttagaaatacacccaagtgaattcatagagatttagaatcacttaaattgacgattaagtatctagtgggaactttggtgtgtttggacagttgtattctatgaaagtagaactatacacatctatgtccaacttttataatatttcaagtgaatatcttcatcaggattcatctcttcattacttctaatctagtggcttattctgtttatagcgtccttctttacatgtttggtttgaagtttgtttatgacctacatttatagagaccattttataaagcaaagaatcaaataaaagtaactattttatgtttgtttcttttcttgcttacttgtagttttgtcccaacaattttacttttacactcttaatttaacattgttaagacatatttagttgatttttttgtattttttaaacttataaataaatcttcattgttatggtaaagtaaatcactttctttggaaaatatgttgttaatagtataagtctatgaaagtacgtatatcccagaacattccttataaatcatgtatgcatatgccatataaaacttatgggggtgataattagatcgtttttcccaaaattcagaaaatgttttatatctaaaataagatcagattcaatgccattagaaaaataatcaagagatatattcattttgtttaaaatctccccctgcaggaaattctttcaaagagaagactttttgttgttgttgaatttccttactatctaaaagaacaaatgcaaaatccaggatgcatgaataattatgaactgaaattataaattttggattttttttagaaatataaagtatgttttatgagtacagtttagcaatgagaattcctggtgtagactgtaaaacagctcgagcttgcaaattaatttatagaaaatcacactccaggtctttagctagcgagtaaagatgcaagtggtggctgcctgatgacgtggtttggatggctaatttgttatttagcatctttctgaaccatcacacatctacagtgccaaaaattctatttaatatttcatttgattttagcaatgacctttattccctaagcattttttctgtctactggtcattatatcatatattaagttatccttcttttcttcagtaattgttcatattgtaatatatgtctaaatttcttctaggtaatattttcatttaaaacttgcaggttcttttgaaaagtcacataagtcgttgtttttcatgaaaactactgcttaattttttttttcccttttcaaatgatctgtgctaaaagcttcatttcagtttcattctgtctttaaacatcctggccaatagcaacttaggatgcatgaaaatcaaggtttattctgattacaattctaaatcacagaacatcattttgggaaagacaagatagaactcaggttgtcagtttatacccaaagtcaagtgtagagataaatcatccacatggcaggcttagttgcttgctgtatatgcttagcaagcatgttctactgttacacagctccgggcctagtgcatgaagttatgctgtctactttctgaaggagtcttcccacctcaattgagattataccctggacaagcctatgggtcagactatctagataattcccagtttcttaccaatgtccattaagattaaccaaatatcttggaaagcatccctggagacagctttgtatttccctcagcacgaagcagttcttgttacagaaataatgttttggttcattatttcagtaagagatggtaggaaaaaatacagcctacttataagaacagttttcacacttcttgggctgctagaatgtgctgtgtattcatttgctttatgcctgtctccaacgtaagatctatctcccaaagagtgaacacattggcaagtagcaatatggttgttatagttcgagatgctgttcaaatgcaattgactctgttgtgagtgaaagtgggtatacacaaatgcaatcagctacaatttgtaaagttaacatggatatgtgtgaacttttgcacatttgtaaagtatttcaaaacacataaaattcctggtattcaactgttttcatttaacttacaaaagtagaaaattcatttagttcaatatagtacttccatgttcattattcttcttcaaagaacacctgccatagttgaattcacacaggatttagagctagtgacctgggtccatgttccaatgatgtcgctgctactgggttaccttcacaaattcattagtgatgagattgtgacacatgagaagaaccaggaatctaattattgaggcacatataaggttattattactactgtcactagagaaccctttcacaatggtgagcatcacaatgtattttaacatatgagatttaaaggttgatacatatcaatatagtcactagttatcaataggacatcaccagatagtaagaggagacattattttttttgccatcagagaaaatgaaaaggaagggcattcagaaacgatgaatgaagtatctcactggttccagactctccagacactagaattactgccttgaatgaccataacagcatcactaagcaacccttcagtcaaaactttggttctgaaatatcattttgttttcaaatgtcatgataagagatactgacaaactgggaaacattcctttcaaaacgcacccaccaactacattaaaactttatgggtatccttctgaactgaggaaaagcttcacactgtatacatgacaactctcatatggacactgctaaactttctatcctttgaatgataaaacaggctcagtatatttgaagtacctttcctgacatatttgtagggaatgggatagatctaagggaagtctcacgtgttttctttcatgaaatattgtgtccctttccattgtgcctcttcctcaagaaactcatggtactctatagtttatgagacaatgtaaataagttttgtttatgagcaaaataccaaaagctcagttatataaagagtgtagaaattttttgaaaaagttttcagtaaattacttagtcttactctggctttacttacatgtttaacaaccacttccagtgtatagttatggattatagttgactgctatacgtaagtaaaatataaaaaaagagctatgttatttggcattaattaacatggcgtccatcttgaatcctacaaacttctgatcatcctattctagttatttttcaatttttattcttagcattatattccatgatgagattttgaagttactgtgatatatgtacagtttcaaggatgtcaagcaatgtttgcttactggagctcacatcttaccaagataatttctaatttgatttagttttttctgtccttctgcatgaagagagtaaaagaactaagtaaatctattcaatgcatccattttaaagctttgttgtattgattttagaagaagatgtcccaatccatctctgacataataagagctactggatgtattgataatgagagcaagttcttttggacttctattagctggggccaccagccttctctacatctaaaggaaaagccatgactagctttcctttcctgtgttcctgtgtgagaatgaggtgtccagctacctggattccatgtggcaagatttcattgatgtgactgatggtctgtgcttatcctttactgtcctccatgactgtggacacttttctactttatcatttgtctttatctttactggtttttatcgctcgtctgtctctatctatcatcaatctatctatctacctatcatctatatctatgagagagaatgaatatgtgagggagggatataaaagaatatatggccatcatggtacatgtattgagatcaggaaaatccatccttctaccatgtgggttccaaactcatgtcttttgccttggctgcaactgccttcagccactgaacaaatagtgctaattttatttattgtttatagatagtaaagcatcaaacattatactcccagtttttgattatctagtcttgaattaacattcctggaactattagtcaagtgatcacagataacttgattggcactaaagtctccattaaagtaaaaggataatactgaatctacctggttcatgtattcttttggaataaatatgtctagaaaaaagcaaaacaattttagaagatctggtctattcgggtttaaattaatttaattatattacaaatatgcgcttcatagaaaaatattagaatttcaagatttagatgtaaatggcttttggttgcttccttcatttgaaaacttgaatgatgccttccagtaccaagaaagctagtcctcagagaagaggcatgcatattagttctaacaaccattactttctttagtaatctatgataagaatgtttctttggaggctcattatttatattcctgcatgactattatctcttctccgtgtattatcaaatgacatatctatattactttggtgattggtaaagaagtttatgtaaaaatacaaagcaggtcatgaatagaatacaataggaaatatgcaaacctcatagatttcaaatttaacttttgtgttttaactttaatcttcatgcttaagagagaataaaacagccaataagtttttggagacaagttgtatttcatccttttcattagagtcatctagataatacttccttttcattagagtcatctacatacattagtaaaaattgacagattcagagacccacagccaaatataggtggagcttggaaagtctggaggaagagttgaagatagaattgagcaagccagatagatcagggatagcacaggcagagctaaagagtcaactaacctgggaccatggttagaaactgaaccaccaacaaaagaacatgcaggggatggacctaaatgccctacacatttgtagtaaatgcacaagcaagtaaatggtattgtgttgctctcctagcaggtggaccagggaactgtctctgactctgttgtctgcaattggatcacctcctaactgggctgcctagttgggcatcagtgggagaggatgtgcctaatcctgctttgactaaatattcacagataaggtgctacccaagggggacagcctcttctctgaggagaaggggagtgtgtaatgtggagagggcttaataagggtaggcctgagaggagtagaaatgaattattgaaaaggaaagatagcatattatggaattcctatgtttatctatatacatttctatctgcttatacactaatcaccaacctacctcctcttattctgaatataagtatggacagaggactgattgcaattattattaacaagtggcaataaataaaattagttcttagtgataagatatgggacgattattttttaataactgtaaaatccctctaatttgatcattttattttatataaaacaaacatgttacatgttcttgtttttcattttggcgaaataaaaacatatcatcctttcttgaaattttatctcttcctgagaaggaatcaaatgaaataaatagatcagaagaaagaaagactattacttgacttggtaatagagattacaggcacacttatgagcggaagtttcactagcacctacgttttataaaaaagtatacatttggatacattttattgctatataagttctttttgaactataattgcttacaaattataatttctggacatatgtgtgtattgttactcatgaacaatgatttgtcatcatggaagcataaacctctatgtttaaagatgtcattcatgtttatctcacaactttgttttcttagatagatgaagattgacaatgtccttgattttaaccagtttattcttccttggggctttgaaatcagactttaatatgatttatttttctatcgttggcttgaagctttctcttgcttttagtcactcttgtgtcccatctcactcatggatatgctcttattgtcttatgaccctttgtgcatggaagactctgatacatagaaatagagatgagtcagctttctccttcaggaatctgacaggacttttctctcattactttctcgagtgaagagagtagtcggtttactgattagagaaatgtgtgaaataacagacctagtcttcataatattctcagcaaagtcacgggccttgtgacagtcggagacttgtgtgctatggtcacaggaaccagaatgactgatgagtcagtggggaataatgcattcatttttattaactttaattattggagctctataaaatcttctcagttcatgttgcattaaaaatggagaagttaattgctcctggcatttaattggtttatgcttttttataatataaacttctacttcaagagacagggtaatgtagttggcatgtttctgcatttgcaggggcttgtgcagtaaaaattagccttttcgttagttgtagcagtgaattaacaaatgcaattccagttatgtggggagagaaataaaatctacaagcctacatttttcatgttctaaaagactagtaagggtttccctaaatgtctcataccgtttttccagaattgttgaacatttaaaattatcattgtatagtttttaaaatgatatattctactaaactgcagacatttcaggttgtttacattcctattacaagccatcaaaacccttcttaacttcttcatatattaaaaaaaaacattattacagctggaagaaatagtatatggtacctggctgttaaccataatactacagtgtaggtctcataaggtgacatactactacaatgtaggtttttggtgtgagaacttcagtatgccacaggactttttattgctagaggtgtaagatattctggaaaacattcacctccttagtgcccaatgatgaaatggtaagtcaagggagtaaaaagagtcactgctagtgcttacttgaaacaatattggagccatgctactcatccctcaaactagacaccatgcaaacttgtgagagattggaaaggcaccttaccctcaaggagcttgtcatcaggagtgaaattgaccttaaatggcgaacatacacaagtctaattggaaaatatgcaggtttctgaaagcatagaagatgggaacagtgagggtggcagccagagaggtgacttggaatatgtgatcttgccactgtaaatggagctgggctggaattatagggtgggtcctttgaaatgtaatgcttagagaaggaagaggcaggaataagataaaaatggacctgtatgcacattctgttgttaattcctaccaagctttctagaatctcagaatattgactaacacatatctaaatgaaaccaaaatgcccaatattcactagaacctcacaataatgtgaaaaacaaacatggttaagagattaacaatggagaggcacactcattctagtctgttatattcaactagacttagcaacggaactgaaagttggagaaagaagagaaatatgctaaattcatatggaataagattctttttaaaaagaaaacactcattattgtcctctggggctgcaattccccatcttcacatcctacacaaaactgaatcgcatacacaaaatggataaacacatcattaagtgtattggtggttttgtccatcagaacagcaagatacttgttagaaatctatacctgtacctttacttacaaggtgggggagagagaatcccacaagaagctatggacaaaagggttaaaaggatctgatacttgactcagctgagtatagtgggttacatggaaatacttaggtttgaggcaaccagtacttgttaagtacatctcttcaaatgttcagactccatctttctttgcacagaagcacgaaacagtatctctttaaaatctagggactaactagtaatgttattaattatctagtcactctttgagtcaagcactctcatgtctttgtaacaaaatatattttatttgttctctcttctgttaatagataaatactatgtacatgatgtaggctgactatttatcttgaaatggaactttggacctcttttccagaggtgagtcttaaaggcacaaaagctggagaatctctcatttagataagaagaaatggatacatgaaaacagtgaccctgtcaaagccagcaattctgtaagagaaatgttcaacagtaggaactcatgagtcagattggaggagaatgggtcaaagtaggtctcaggagatgtgaagaattttatcctgtgaagagatgagacattctttgtgaagttagaccctaaaatgtgaacccaaagtaaagtcagtcaagcatcttaactacatccttggtttaaagaagactgcttttatagaagataaggttgaaatctactattgtgcacaacaaacttctttaaacttgttttgagttaagtaggagtataaagactaaatcactgtcccatgcaaagtgcttcatatatgacaaccccagtgagatcagggactctgtgtagtcatttatttcctctcatcttcatcaagctaaatggttactctaatgtcgttacacatcttctatgcttaggatgttatgtaaaattaagaaatattacatgcatttttgaaaatgtatgaccagatttctgggctagaggactatctctggatattccagcatgtcacttctggccactttcacaaaagaagcaagaaaagtcagtggtgaaaggcaaaagggatttgaatcaacatggttgcattaacaagacaagtaacatttccccccattctcaggataccaacttgagccgtagtataaataaaagaataattaagactggaccaagaaatatgtctaattaagtggtcatgggtaaactgtggtgtccttagtgattgcctcaattctagtatctcgaaatgatcctagagccagacatgttagctcttagctagaatcctagcatttgggatgctggtgtaagaggactgccctatctcaaaaacaatacaaagaaatggccatggaaaagtccttattgtttgagaaacaccccaattcccaagaaaccccggatcctgcttagggttaggtcacatagtgtggtctttctcactgctgcctagtgtctatggtggctgcaagtttaagaccatgactaaaggcattcaggaactttggaaggagtgtgactcaggacattgcaaaatctgacagtgagatgcatcagtatttttatctctgtgtctttagccttggaagagtatggcacgcattgagtctaccactgctataaacaaaggtagaaatgccatccttttatcctgcttttacttgccttcctggtagaagtgagtagccattaccatttgtcaaaatatgtttctagctacctagtagcattttgtgggttctgtactgtaaattacatgccactgtgagctaccataacttggaacataaatgttaaagccgaaacctataaagagagaagggagagagtccatagttgtttcagaaattatttagacaaggatgcaaagcttctgatgcatatcaggattacaaagcattaattttggtggatatggaggtagcaaccactagagctataagggacagggaactctaggccagtggcatccctactatcaactgtaacaactctgagaagtgactttttctagacttgttctttggaagtacccatagtattatgagactagaggaggatgtatatgccctttcgtcaatggacacttttatagctataacctgcctctaccttcttgaggctggcctttattttgaagaacattacatctgttgaattttgtcagaaatcaccttggtagcagttggggtatcacctggtgttggcattctaggatttatagaatttgtttccaacaattgtcaagtggttataactcatgcttgtaatcattcatagtagatagttatatagtttacaataacagggagtggggtcaatagtatgatgaagtgtcttttgctttgaacacaactgcctagtaattctttttttaggtttcacctgattagtcactaatactcctctgttcacactcttgtgctgtctcctgattgccctaaatttttgtaaagtttgaatgagattctactaactctgacaaaaccatgtgaacattttggcatttagttaacttcttatttcaaaatacattttttaaacagtatcactttctattatttaatgaccctgagtaaaatattaaattaataacaaaaggtatagcacattcaaaaagctttttaaattttattcctttcttctcaacacaggagtaattaaattattaatttaaatataaatgaataaattttggggaattgattatgtgcctgaaactacatgattattttacatatgcataccaaaaatataattttatttattctcaagcagacccctaaattcataccctaagaaataacattaagatttagtgaaagttaaaaaaaaataagtacagttactgtgtatcagattctatagtagaccctaatggaaaagtgaagataaatttgacaacaatgtcttcaaagtagctagcaattctttcttttctgaaagtagaagaaacacccaaataacatatctagaggactctggggtgttttcaaaagctgtatggaatctcaggatgggcagttctgttagtagacaggtgttctctacttatactcttcagcaagttgtcacagagaggtaagcttgggtgcagaatcctgaacatatttgtcaactgagacatgctgtttgtagagcaccggcttgtatttctcactgatgagtgcatcagtttcattcctgcagatcacataagatgaagctcctggtgataaattggtaaatacagaattggtaaataaattgataaatatagaattggtcaagatgtaaccagttggagaattccttcatgtttccttactgttcctgaagacattcttgtcttatctacaaaagccaaaaagagaataaagatcactttctcaatagatagagagagaaaataagaattgttttctgcttgtgcatgtgtgctagtgtcttctgtaagccagatgccataatctctcttcagttctcacagttacagtctgtggtctaagagcttcctttaaagaagaaaacaatgcttagcagggaagtaaaattagaatatattaggaggcagaaaaacattttaattccagatctttttttttttcattttaaactccagattttattcctatcccagtccaccttttgactgttgctcatcccatatgtcccccacccccacccccagtctccacaaggatgtccccaccccccatctatcacccccatcagacctctaaactccctgagcctccagtctcttgagggttaggtgcatcttctctgactaaacccagacccagcagtcctctgctgtatatatgtgttggggaccacaaatcagctggtgtgtacttgtgctgcctggttggtgttccagtgtctgagcagatatttgcacccaacaaatgggcagcagctgctgacctctattattgaattagagaaaaggctggaagaagcaaggaggggggtgtccttataggaggacccgcagtctcagttaacctggacccccaatatctctcagattccagataatttttaaatttagatcgcatataattattaagaataagataactttggtgaggggaattctgataatgctgcattgaaaaggtatcctattatacaattcaataaagttgccaggcagcagactcattttcaggtcctcatttttctatagcctaggatgaggttcagaggttgtaagaattttgtcattattttcctaggatccttttttttgggtatggtaatgaccatattgtgtgaaatattgttttgctattttattaatatgccaactgatttctggttgcattagattcctttactcaaagccttcaataatatcacattaaagactaccaattattaagtacacatgttggtgtcttagtcactgttatatttttgtgaagatacaccatgaccagaacaactcttagaaaccagtcaatcggggtcttgtttacaggttcagaagagtagtccattatcatcatgacaggggagcagacaggcattgcattggagcagtagctgagagctttacatcctgatccacaggcagcagttgtacacacacacacacacacacacacacacacacacacacagagagagagagagagagagagagagagagagagacagagagagagagacagagagagagagatagagagagatacagagacagacacacagacagagagagaatcagagagaaagggagaagagagagaaagaatgggggccttttaagacttcaaagtccccccccccccagtgctatagatcttccaacaaggttatacctcctaatcctttccaaacagttcttcacctggggggcgtaacatgcaaatatatgaatgaagaacttacttccgtgggacattttaattcaaataatatcctatatatcaagtaatgtgctaaagtatgttactaaattttcataaccaaaccattagcacaagtttacaagtaagatatctgcctgcggccggaggttagaacaatagcaacatatcagagaacacaaggaatgtctctcatctgtgtctaaagttcatattcccaaacactgaccataataattcactttactaataactacatatattttctcacctaagagacaatgtttacaggtgaaactaagcaccaaacaaaaaaaaagcaatgagtcattttaggaatggttagtgcttttatcacagaaaaacttccagtgaagtaggacatggacagccatgccgagtggtttggaagatgtagatgtcctcctttgacctatatatggcatctctgttcagcagcaccttggctccttacctagcactgaaactgggcatgatcatcgattaatgtagatccattaagaaactaccatgcggtcctctttttcctcctcctcctccttctctttgttcctctcctgatggtttagcttttctggttcttcatcactttcaatatcaatatctaaaatcatgtgtggttcgtcccttttgtttttttcgcctgcttgttcactatggagaaacttgaggcattcaaaaggcccgtggccagaggaggaagctctgctttgcagcctgctctgactttgtgtcactgcaaccctggagtgagatggtgctggttttgtggttttgttgatgcacagaccaagtgtgcatttggtctgtctatccatgttcttcactgcatgctgcctggcactgagggaaggtacacagttatctggtgtttggacctcctcctggctgaagatgaaggcccaaaacaggatctttcccaggagctgtgttgctttggccaggaaggtggctggttgtctggagccgaagatggcgctgcctcagaagctctctggctctcccctgtcccagaaacggctggcctctgtgttccacaccctcacccgtgcagcctgccctccgcggagtcccggagccaaggaggctcccgccgccggggcctgaggcagaaacctctcgggccgggcagacccctgtgctctcaccaggaaggtggccagttgtctggagccgaagatggcgctgcctcagaagctctctggctctcgcctgaccctgaaacggctggcctctgtattccacatcctcaccctgagaaaatattttattgtagtatatattttccccattttctgaaagctttaaaaacaccacctgatcagttgcccaaatgaactcttagtttatagtctagatagcttcctaccagtggtggagagccaatgccactaaaattagagttcctttacactatgtagcagatgagcccatctcttagttcacaagaagctacgctgtgcaactcttggatgtgcagacactctctcatgtccaatgtctgtatcctggttactttttattttcaacttgccacaacctagactcaactagaagaaggagtctcaattgaaggcttgcctttatgtgattggtcactagctatgtctgtgagagtctgtgttcattgataattgatggtgaaggactcagcccactgtgggtggcatcatccctacacaggtgtaagaaacttagcaaatcatgagccagacagtgagtgagtcagaaaaggagttcctctatggattctgccttgagtccctttccaaacttccctcaagtgatgaagtgggaagtataagccaaataaatcctttcctctcaaaaaaaaaaaaaaaagaaaaaaaaaaaagaaactaccatgctctttctcagttgtacagttccctgaacaaatcaagcctgcccatccttaattggagaatagatggggcactgcaaatcctgacacagaccattcaatggggggcgtgggggtcaaagctcatccactcaggaaaacaaccttctttacaccagaattgataaggaatctattttttcatgcctttcttgttatttgtcttcccattttcattcttaattttcctgatatttgccagatagtgttgataagcacatacatacatatgtacatacatacgtacatacatacatacatacatacttttatttttatcattttatcctgttgggatgactgttttgtctgcatggatatctatgtatcatcatgtacacacacccagttagtacttatttctaaatcttaatagtctaaagtagtttaaacataccagttgtccaatacaggtagttctcctaatgtcagttccttctaaggtaagaactggtgagacacagccagcttgggataggttagtgtttttccttttttctctcctgtcaccctcatatgggtgtcttgaatagatggttaatcacatgctcatccttgtcttcctggtacagcatgattatctccctaaataacgtctgtctgatgctttaactgcaaatagtgttcgttagcatctaaaatgatttcaattggtgatgtaatacaaaggtatttgcccttggcagacaatatatttcactgctcatatgtttagggccttggagtgatacagtgatccatcatagccaatcacaaattttccagccacactcaatcttggtgttcataaaactgctgatatactcctagtgcattgggttttgaaagctttctgggcactgagtaacaaaaactaaaatatatgggaatctgtaatattctacttagcatttatattatgatctgaggtgggtgggggagatacattaacaaaatagtccatgatctttggaatgagattaaatttgaatccaacctcactgaatattgcttaagaacttacttcctagaaagcatagcctcttcacggatacaaagaaaactggtcatgcttgctgttcctcaaaatacatgtcaatttagatatgctccatgggcacagtgcttccctggtgccctgaccctttctattcccatttgcaatgggaagaggaagagttggcttgtgagacctaaagctctaatgtatagaagggatacaatacctaattctttttttatgtatgtatgtatttatattaattaggtattttcttcatttacatttccattgctaccccataagtccaccaaaccctccccccactcccctcccccctccccctaggtcattgaatagtcattaactgctgggcggtggtggcacatgcctttaatcccagcacttaggaagcagaggcaggcggattgctgagttcgaggccagcctggtctacaaagtgagttccaggacagccagggctatacagagaagccctgtctcaaaaaaaattccaaaataaatacataaataataataataaagaaagaaaagtcattaactgtttgtttttaagcatatgccatgtagtgctagtctactctttcctcattgtggttttctgtttgctgatatcccatggtaccctagacactgaaccaagtgtttgttcttggtagctcagtgaggaacttgcctataactgcctcattctcaaaggcacactttaccattcccgtttctcagaatctaccttggatttgatttgtgtctatggctagtatgctatggttaatgcaatagcttttaatgagtaacctatgtctatgtgaccacacaacacttgtgtctctaaggttaaagtgtaaactatatgcatttcccctgactacaagttgcctgagtgctggcaaaggtgtttgtttgtttgtttgtttgtttgtttaatgacttgctccaatttgacagtttgagttaaagtgggacccccagttgacatctttgagaatctccccttttccattttaaatttgaacataaatggtcatgtcatatgaaatatgacaatatctcttcttaataggaagtctcatttgaagactataactatgtgtgaatttaataaaaatgtctatcatcgttaagcatagcagtggtttgtgtgtgttagaaagtattttatagtcctacaatgtttatcttacgtaaacctgataaagaaaattgagatttagaaattatgtaacatgtttgagattccagagcaagttaataatgaagtccaaatctaatttctgagtccaggtttttaattatttcactaaatgcaattatgagggaaattagaggcaatctaaagtaacttccttattggaataaagagaaaaggaaatctcagagatcttaagtaactgtccaaatccaataagcttcccagggacaaatgcaaggcaaaaccacccaaccggtgctaatgtgaagggcaacacatattttcctcctatatcataactataccacagggttattcttccctgtgtaaaaattcttgttgactttttgaggaaatatttttatccttctaatagaaaatgggaagaggagcaagaaagtgagagaaacatacatagtgatggagagagagagagagattcagagagagagagagacagagtcagagagacagagaggcagagacagagaggtgggggaggaaactgaaattctacaagttgatttttagattcagatcgttttcagtaaacacaaagtcagtctttcaagatggaaagtctgagtctgagccctctggcatcacttcatgatgattcagagatgttataatacagataatgacaagaacacctgatatttgaaatgcaggggcagtgttcatgcttagaagtctgtgcctaaaaacaattggaaggtaatatatttgtccacatcatagtaaaaccactctattttaatagaaatgtgaataccctataggtcaaattctatccatcttcttaatgttcagtccattgtctcatcctagaaatttattgtagacaacactgaaaatgttatcttccagaggtaatctggaggccaaacatgtacatccccacaaaatctaacattaacatgtaatatctaggatcgattatcttggctccttaactaacatcttcatatctcctggcctgacatttcagtgtgtccgtttgacccatttccactatgaaatctaatttgaattactgatccctgtgccactgtaacaacataaccaacttatgcagcataagaggacgggtggttttgatccataattgcttggcctcatggaaaacatggggaaacatgatggcaagaacatgtggtggggacatttcttgccctcaggacatacagaaagtaggaagaaaaaaataaggaggaaattcttaaagaatggccccacattttgccttttgagcttaattccttctgctcaatctcccctcgtaaaatttgtgctcaccagcacatatacttgaaaagaagtggaaatgtctgagtgtgtgcaggactcatattcagttcagaaacgttctctgcctctccctctttttctatatccgtttctacccattttcgttcaatttccattaaaatcgtccttgcatgtttagcagataatttcatggcccgggactatccatcattgtctttgtcaatgtcaatgctgattatcagagctgtgcttaattccgacctatttcgataaacttgtcctttgattcagtatttttgtttctcttttacttttgttttgtgtaagacaaagtttgtgtagacaaagctgacctggaaaccactacatagcctctcagttaccttgccgtggtctttgaggacttggatttcaagcaagcaccgcaagctgcagattattgacatttttatgtgaccatttaaggaacagtgtctgctctgttagtgtaaaacctgaagaaagatgaatttctgcccttgtgtcataaaaggattaactggagacataacaatgtttaccctaattaagagaggaattcaagttttacaacatacataggaataacggtcatgggaaaaagccgagatacactgagctaaaaagatgtgcgttttagtagaggattggaacccaatgacaataaagtgtacacctgcttttttattttaatggatgatttaatcaaatgtgtttttaattgaaccatttgctgatgcaaactattattgccatcattacccttattgttaccaaatgattgcagagtataaacttgggactaggcatcttgtagaagaaaaaagaaatcttgataattaattgtcattttaaacatcttcattttcctgacataaaataccaacaagcaaactaacagaaactctagctcgtccatcagtagattagctcatccaacagctatttttttctcttagcaatgcttgtcgagatccaaacaaatgactaaagtcaactacaaggagttatcacatggattgtaaggctatccatagactcagttggatcagcagaaagactttgaaatgcttactttgtagaaaaggaaatatgtacaattcataaaacatttatttccaaccccttcctgtcattacctttgactcttgccctctttgagagccatcagctctgctacctaaacatacccatatttctaaaagttatacacagttatactacacaaaatgatgagattccacctgtcctcacagctgtgctcagggcctctttattgagtgtacctaagtggctctgccgctttctatgtggtatctcttttaggtttcttgctaggtgatagtgcaaccatctttactgttcctattttgcagtggggaaactgaggctcactcagattagttaagtgcctgagaggcatagatagtgagtgataacactgtgattcacagtgaggtatttgagaatgtgttctgtgtaggaccctttactctaggattatcagtgaaacttctgctttttagtatgctaagactatttcatccctagtcttatataagaatatattaatgactttccccatttaagcatttcttaattaatctggctgcagtcaagtaaatttaccatgggaccttttgaatgtattgttgatatgccagaaaaatacatctttatcaagggctcctctgacttgatttgactgacaacacttaatcttagtaacaagatgcccatgtttttaaatccttacttagggaatagtgttgttatatcagaacaatacgcaaacaaaatgagaccttataaccctggcttaatttctgttcaattcaatgcaacattttcttatgaccagctagaaatgtaagtattctgggaatctaaacatgattaaaatcttgtccctgcttttttgatgcctaccagaagaccagaagaaaaggcaggttttgcatgagctaatcaagaagggaataaatcattggggctccagggaaataggggtttgtgagctaggcatagaaggacctagagttttgaaaggtcaataaggtatgtgataatacttaaggacagaagatcttcaagcgctctgagcacataacatattatggcagaagataatgtgtatgtccagtatgtattgaacagaagatgaaccagaaaagatgagcctgcagttggtggtgtgtagggagtcaaatgagcccgaaagcaagaccagtctacaagatcttgttagcacaacacccaaggatgttattagacatggagtaaacggagtacacttggagaagtaacagtgacatctgaatgaaaggaagatgggagatgaatccagagggtgtagctgaattcaagtggtttagaaaatgaagcatgtttctgacgtacaacaacaatatagggagaaaaagatctgaaggcaatgtactccaagagtggaacctgaattggacaactggctgggagatatggggggaagagaatcaattgtgactcagagtaattgcttgcagtagccaggcaagtggtgatgctgctggcagcagggagagagagatggcgacagtaagtgtacttgtggatgatgaatgtgcctggatgccttttggtttgcagtaggcatctgtggaggatgatagtaaaattcctcattaattatcatctctggtgtttaatgaaaatgaaaaagagaatctgtccacagcctctatgaatcacatcatttttctactcgtagcttcccagatatatgaattttcatagaaaattccaattggaatggaacatggttgtttaggaagaattaagaatacgttaaatgaatttgcagcgacttcgtcattggaagaaataatccctgaaataaattttaatcatgataattcaggccttgtttgtggaaatacacttccttccactagacataccaatatatatttttatagaacttctcagtcattaatttatgccaaactatatttggaaaagcacatcttatatttacttacgcatttgggacaggatgtcattttattcattccctacgaacctgagaaaagctgttcacaagatgggtaaatattgaatcctgtcttataaagatactccttatcaaaaatgccagaaaatattgccaaaaagtggaaactacaccaccaggagagcaccagcagcaggaacttggtagaaattaaactgagtcttcccaccgacaatcaaaaatgtgtgacatcaggatgttctactgctgtgccctggttgatgtgaagagaccacgaagaaatgcagacagaacaaacacacaaacataggtaaagaacagacagacaaacagacagaacagacacacatccctgaactggggaggcagactggggaggattcctgagttttgctgtgtagctagtctcaccaaatcagtatgttccatgtgagaaaccctacccccaaaagtaaggtggaagagctatgggtgaggatatcagaagttactctataacttccaaatacaaacacacacacacacacacacacacacacacacacacacacaaaatatacaaataaacattttctaagctaaggaaaaatgtatttcccaccttaatggttgaaagtacattggatttttgaaaaatgtaaagggcttgacatttggtggttctaaggctggtcaagtgccccaaaatcactcttggtagaatcaccaccacaagagaagggggtcacattcaccttggtcatgaacccttcattcctccaccacaaatatatgtttcacgctctcgctcttcatactgcacagaatcaccagccatcaagtgtctcgcaaataggttacatgtaagagaaccctcaagctccatttgattttcttgctttgaccacttcaacgaaagagagatggcttccagtgctttcatccatctcagcagatggtcccttggagctcatctagtgcaatcatcactcagaggctgacatctctgaaaccaaagcacatctcagtagagtaacagaactgcctataatgagcctcctccctcatattttatctcaagaaacctctccattgtgctgtttaccagtttcatcttctctttttcatatttttgttgttgttgttgttgtttttctgggtcctcttcaagcaatgaaagaatcacagttccattttgccacctccatgtccccactgattcctagggtgtcattgacatccacttatctgtaacttgttgcaggtctcttgccatttctgtaagaacacaccactcttgtgctcagagcgcgatctcagtctgcctacccaagcagagctctatccgactgactttgggctcctttgatgtctgaggacatttgcagctcagcagcagatttttcagccgctttgatgtgctcttcttattatgatttgatatacactgtgttccttttatgttcaggaggaaacacataaagaaatgtccctcctgcttctcatatctaattgttgctaaagcaccccgtggggctgtttatagaaggggtggttctttaaacaaagctcagtataatttcattaaagaaaaacaatatctgacaggctgaacatagtcattcataaagtcttaggtggctttttatctctcctctttttgcttcatgttgcatttgcataaatggttctttaagacaaggagaattgactgaggataaaactaagccaaacattcaacgaggtttaatttgacaatcacttatggacatcatggttaaatgtactattaatcattttgttaagctacatatatccaaagttaagtactgagtgggtttgactttaagcctgcagcacacagacatggtgtctgaattaacctgtggatgattctggtccagatgttgatggccctaaaggcctcatggaaagaggaggatgaagaataattcttctctgataccacattttccagtttcccattgttctgtaacatcaggccatcaaccacagtttatacattctatcacaacacaggcaagttgtgttcactatttttaacttaccttctttagtgaggcaatcagataaatgtattattgttagcataccttatagatggtatgaatatttaacctgtttcaatgtctttaatcaggtgattggatgataggtagctaagaaactgaatagaaattatgtgtagtgtttcttgcctttgtttacttttgtatggtctcttgttatcattgaaccacttggtagagggaattttacattcataattacactcaaatgtcctaattttgtatctttacactatcacattattttgatgtatatttgattcatttgagtaacaaagtgaggacatttattacttgctatgtgatatacatagagataagagaagctcaaggataattcaattttcagtttcagccttatttactgctccttgtagtatatctgggctaatattgaacctctcttagtaaggagcactttagcttaaaagaattgttacttgtgtagactgaacgttttatatttaggaatgaaaatatataaatatatatgtatatatacatacatacttacacatatgcatacatacatattcataaatagagatatatgcatgcatatatatgtacatatacgttattgcatacacatatattcatgcaataacaatgaaaaagagtctgaattggaaagagatcagggagtggtacatgggaggatttggagggatgaaaggggacaataaaatattataattatattataatctcaaagataaaattgaaaaacaaatagtttgtatctcataaggaatacgagagtaaagctgtgaactggtgtctgttgagcatgactctgtcattgcaatcagaacgtcacagggactaccttttgcttacaatggacttgcgcaagtcttggcttgtcacagtcaacatagtccatggagtcagagctcatgaagttccagctcttcctgctgaactattgtctactgtggattctcaaggacagcacgtcattgtcttcagatgaatagccaccgtgagtccaccagacagcattgtgtagttctgcaactatattcagatggtcctgtttaaactcagtgagtcataaaacaaaatacaaaacatgaatgtgggagagggatctgtagaggggacaggatggacaggatctatagacagttggaaaggatgggaaggagacaggagtgggatccatgagaatcttttatatatgcatgtgagcttgtcaatgggaataataaagcaaaaaatgaaacacactaacatgtatattagacatgctgaaggctagccatacatttcaacaacaacaacaaaaaagaaaccattatccacactgaagtttaccctaggagaattttgttattttatcattggtagcaattacttaaacactcttagacttgaactcagtcctgcttttgttcttcttaagcaccactcaagtatatgtcttgctatttttagcttttatggccatatcctgaggcccaaatgctgtcaaatgatggaaataacagaaacacagaccaagtatgacagtcacacaaagctacacagtagaataaagtgcactgttagggagtccagggacataagtagaaagtcagaattcctgctcagctgaacgagataaaagctatgagacaggttttgtacagaatcagaaaatcttcaagaattcctagaaggtactgtatggctctattatccaggttctgagaaactaaaatgttttcatttctctgttggtatcacctttcataagtagagcgtgctacctatgcttaaggttattgtgaccattgtcataattctgaagtggtaattagttttctgttcagagataacgcagtgcttagcattggagggtgctactagcatataattaggagagctggtagggagggatactgctaaaccctcaaatcagacttcttcacctatgaaaactctgtccaaagaatcaagtgcacaaaaacaccaataatacctacattgggaaactctgacttagacaaaacaactttctcaaattatacctaaaaatcaactcttttaaaaaactatttttttaacaaaaatcccacctgataaaacagtgacgatacactatatcaatcattttacattatcatatcacttctttttgcattattcatgtatgtgagtaataataaaccagaaacttcgatttttttttcctgcactgagactccgaaaatgcaatcaaactttgaaggctaactattgttttagttcaatttgccgctccctatgtataccacttaatttttctctgaaataggagtcacctgctgtccactgatattattaactaggtatgccacagacacccagtcaccattaaagatctccccaggcccttttttcccagatgcttcattgactcttagacttcattccactgaggccattctagactcctacaactattactaatactaggacacccagacatgcttacatgtgaaacctcagagtccattcagcttggtcctgctttcagtattcttggcatagaatcataatgccttgtaagaaccagaggatttgatcctatggaaagtaaccgatttggaatcagaaaagtttgtgtttctctgtcattagtttctttcctataatggtggactatggtggactcccaacctggccccaggtagtcagtgtgaatgtttccactctctcagtccatttttatttttatttttattttattttattttattttactttattttattttattttgttcaatctgcctaccttctttgcctgggtaccctgccaaacctttgccatttataatatttctccttcaatggtttcccctgctaacttgttgattgcttttctgcaccaaaaatctctgactctgactatttctgagagtgtgtgcgcacgtgtggatgtttgcgaaataaacacatcttacttttgcagaatttcttgtaaccacacatatcacttttctgttttaatgtggtcttttgctggctagggttagggagagtcccagatctctgttctctgttctgctcagcaggtgctatgcttctatacaatgccaggtgatggattagggcacacacacacacacacacacacacacacactgacactctctaatcctgcagcttgcagctttatcactattcagaatggcacaggtgcttacccagctctgacggtctttcattgccttcttggagagctgagctgcctgcctgtttcatttatcaccctagtgatagcaatccaccttcctgcccttcccctgggccacctgcatggctgctagcctttgagattgatatttgctatttctactacctggtttattcttgcctttctgggcatgttcgctaaaaggagcatcactctcgctgccccgcgctggggcagaaagctctattatagactctgggttgattactcttatgctttctgtctgaatcagcttccacctgtgagtgagttagcatctgctaaagaggagatatcaggaaagcttactccaatagaatgctttaattctttggagtaagaccagggatgccaccagcttagctagcctgtcccatccccacttaccagcatctgatttcccttttctttctagttgactcagacctcagcatggaatatggacatctatcacacccagatcacaagggccccacatgtcaaaaggttaattaatgtagcccctgactcacccttacaaacccagagaaccttacctaaggaaggtgaacatgtagagtgagcttccaatgctgacacagacgtggcggagcctgtctagattaagaagagaaggaaaggctagtggaaatctccaagtaatgcatgcgaatgtttctcttacacttacgtctttacagtgtgtatacacagggatggatgtgagcacaagtatcacagcactgagtgtaagtagagtggaggggatggtttatgggagtcatatttcttccctttcataatgtttgttcctggtattggatttaggtttggttgtgagcacctctatctactgagctctctcatctgcccaagtaagagaaattttaaaatacttcttgaaagcctgttcacatactcaatatttacttcaaaggccttacttctaatttgtcatttgagacagatgttagtagtgaaccctggcgtgtaggaatccttcttgggtctaggagacaatggggcccttatagcacgtggtctacatcttgttctctttgcttgcgacacactctgttgtctacggctcatataactgcctttgtctgggaacctttgacaaatccagtctgcagacccacttcagacctatgagtcatggcctgccttatgacaggttcctggatgcttcctgtgcatgggggatggtctggtcttttggtttctgcatctttcctcaggaacatcttcaagggattattaagcttttcatttttcagatggataaacggatgctaggcacactgaagtgattgacttagtgtcactgggatcttcaacttgcctgaacaaagaccgctaatctattctcttttttgccctctgttattaatacataggtattcagaataaaaccagtgttgctcatgggtttaatatagttttcaatattaagaagccgaacattctggtttccttgggatggcaaatgtttacttgcaggctaaacttcagtgggagctgtgattcctaaaatgttgtctgggcaggaaactgaaaagttacatttcatacatataaatgagttggaatgttcaggaagttcccagacatgtggtagaaagaagacacactggggctctcaacaaaatggcagtccaaagatggtcacagcaagataaattatctgttaagcagataattaccatggcctttcctctgaacagcagctggaaataggcaagaacagatggagccagaaatagagatggttgtggggcatcctcagaggagaggcaggtatcctcagcacaacggtttaaataagaggggccaccgaaggcgagaggtgtggattcttaccatgcatttaggactgctgaggtatttcatcttcctcactctgactaggatctctagaggtaaatgggccaatgtgatttgccatacgaatacatattaatctgtgcatcacatggtattgattatcattaaatttaataatacttatcccatcccatcttcctaggcagaacatgaggtgttctctacagtgatggttgcccacctgtattcaagagtattcaaatttagctttctccttcccatcctttctactgtggtaaaaagtatacagattttctggaagtctcttggcttaggaagtcacctgtctaaatatttgtgtcatcaaccttgcaagggtatttaggtagtaaatagtaagctatctgctctttatcaccaatttttgtgttaagggcaatggaagattcacgctttcaggttgaatagtcacagaacgattctctggttgataaccatccatatttcaaacaacagatactttgttgcattttacctatgtgtactggttttcaccattcttctagttacataccacacaagcgcgcgcgcacacacacacacacacacacacacacacacatccatactattccattggattcttgacacatacactattgttgatgggcagctatcacttggcaatgtgcaaaattcccttgtacagcttgagatcaagcctttctgtattgtctctatgtggttagattttaattgatagaattctaaagtgctatctctctatgtggtttttaagcacatgttacttggaattactaagagagttgttaaaatggtagttacgaacataagggcctacttgggaccatgaagaagaggtttcttaatttttcaaattaatatgatcatcttagttaaccaacagactatcttccctatagaaaatagctacaatatttagtcatacaggttagaacactgtgtagtgacggatcaacagtaaagctttaaaaatatgtcaagatgaggactaagcatctgacttagtggccaaggacttgcctagcatgaaagaggtcctaggtaaaatccacagcagtgtaatgaagaaataaagaatacaataaaataaaataaaataaaataaaataaaataaaataaaataaaataaaataaaaatgggaaatggaaccaatgtaaatgtaacacttgcatggtgatataaacaaatggctcattaggaatcaatcctctatgtagagggaaaggtaaattaaaatgcatattttttcacacctgacttgaatgagactccaataacacagcagtgtttacttagcacttgggtttccttattccattgtgccttccacctgttagctcagcagacagtctattgatgaaatgctatccactatgtcataagtgagttacaggagacatttaggtaaattaattaggatctaaactaagtatcagtgaatcaaagggagtcataattcccacttttcagaaactaagaagtctagaaagatcgattgaagagacatacatgctggctaagcactttctctttacttctcagcaaaaacaataatgccttttctctatttttattggttcccccttgtttctacaaacaaggaaatcagaagaaggaaaaaagtaagacccaaaataaatacaccttttattcaatatttcttacataaatgtgaggggaaagccaagaaaacacattaccttaatattctaggtgagcatatcaaacctcactgaatgatttctctgattgtggaagaactacaaactagcaacaaagttatcaaagattacagattgagaacacatataagtaggaaaaattgagcttaaaaagaaatcatattacccagagtttaggaactcacaagatattgcttagtttgttgcatgaggcttgatttcttaatcaaatatattctctcacctgtagtttgaagtttattaagatgaatgaacactggctttgtttcacacaaaatacagttattcttgtttttgattccatgtcagtgatgagaggatgggatattgagttctccctcctggcaaaagtgggcattggatggaggtgggggaaagtatgttgttattgtaaggtatctaggtctattaaatcattaatccaggctgaagtccactagataacatatcttgtgagatgtgacataggacaggaccacagaagaacttctatgatctctgaattctcaataataatatctacccagggaatatctgttaagttactaatgagcagttgaataaacaaggaaacaagagaaaatttagttgtcaccactttttatgaaaggaaggacccatacacagttttgatggagcagttttgagctattagattgggctttttgtccatgagttcagaaatcttaggaaaaatccaaacaacaacaacaagaaaaacaacaacaaacacgaacaatgaattgaaaatgatgaaaatgatgaactctcattgtgctaggcatttcttgagcatgatcactccttcccaatgcatctctcaatcatcttggacactgcacaatagtggctgtaccactaaatgtcaggcataaaattcacaccaagtgggtaagcacatagctctttacaaagaccccgcaaagcacacactcccttcaatctccttgattttagaaccagtgatacaagatgaatgatccaagcaaatccagcaaagtaatcacttaatttatttatatttatgttattaaaatagtttttcttgtacagtataatctatgtttacttcctctaccccttccatttccttttcaattctccttgcatctagatccacaacattctctctcttgttagaaaatgaactaaagtataggcatctaaagtataatggtagataaaataagataaataaaaaacaagacaaatatgataaaaacaaccagaaaacttaaaaaagccacggaaacattagaagaaacacacatatacagagacatacgcttgtacactcaagagttctatggaaaccccaaacgggatgccattttacacacacacacacacacatatatatatatatgtgtgtgtgtgtgtgtgtgtgtgtgtgtgtgtgtgtgtgtgtatgtatatgatgtatatgtaaatgtgtgtgtggaaaggatgtgtaaagcatataaaatgtgaaaaaagaaaacaaaacaataaataaacaataaaaattcctaacaataagaacaaaactgtcgcagcttaacattaggaaaaagaacctctgaagatgctttgagtgtgttttgtgttagccataagtgctgggcatgctgcctatgaatggtttgttttcccagtggttctcacttggagaaaattaattttccatttccaaatggttataaagtggagatagcttctggcttagggatggggcatgtttccacttctccttttaatatctgatgtagacacaaggataccctgtgcgtattcatacaccnnnnnnnnnnnnnnnnnnnnatattgtgtggctgtgggtttctgaattctttttcctaatctgatgtaggaggaagcttctctaatgaatgttaagcaaatctcagatttatgaatgtagcaggttgtggtcagaagttattttatggctatcttcttttaataggacagcagtattttggtttccttcctaagtctctggtctatctagtcttagtttcttagtcatgcaagcatcactgtgtatgagtttcatcttataggataggtcttgattcaaatcacgtgttttctggctactcctgcacactttgtgcaccagctatcttgtagacaggttattcttattgatcaagagatttgtacttgtgttggtgtatatctttctcctttggtaccatgcagagtatctctgaatatcattaatactagtctgtagaggtgaaggctctagctaggcttttctatgttgtttgggtgttatcttcagaaatatagatagccattcatagcctttggaagagcctggtttggttgcaagttcccatggacaccctttaccaacaattcaaatagatgtaactcatttttaatactgggaagatttatttactgatgagagatgtccaattggtggtctatcttccccaattttatttagctcacctttatacatgcatatattgtaatgaagcttctactgtattgggtttccatgtgacctctcaaatgccctttaattttagctgtctcttcctgtattccctctctaccactttcttgtttctccctctgtgtttggtcctttatgtatagctatctgttctacttctccttctttcagatattcattcctgcacccagtctcttattctttccctaaactttgtgattatgattggagttttctagtcaataacttctaactaccttggaggatggataagagattcacttgagtttagcagctctggggtatagtgaggtatgccaatcaggtgtctgcacaaagttaggcaaaaaatatgcttaccttctgggatctgggaaccaccaggtaccgaaaggaggggtgaaccagtccaggttataaatgaagaatgtggaaattcctgtgctgattaacaaattgctttaaacctatctctgaagacagcatctatacttccctcttccactgtgagtcctcaggattggtacagaggcttggtaagaaactgaggtgttgccttctttttttgtaagcaagtcccatatttctatttctactgcaccattctttacaggtatttgtaaagagctatgtgcttacccatttagtgtgaatttaatgcctgacatttagtgatgcatccacttttgtgcagtgcctaagatgattgagagatgcattggaaaggagtgatcacatgatgaaatgcctagcacaatgagagctcatcattttgatttgattgttggtgctttgttattgttgttgttgtttggttgttttgtttttcatataaaatctgaaaacagtagtgtgtggtctaatgacaatattctaaatagtactgttcgtagaacattacattttccaacttatgctttctgagttatacaatatcattgtatggggaaattagtcgtttctgatgggcaagtttgtgtcaatcaaaagagaccataatttcagcaaaactcttctttcaataaagttcattgaggacaagcaaaaaaaatgttcctttcctgcaagttctctgtgtaaatcagacacaatagaaacacaatgatatcagaacacattggttgtctacttgacatacattactattttgataagccttacacacatagccacccggggatcatttgatagaggcttaatggcaaatatgtggacacatttatctctctcattttttttttcttgggagcattgacataagaaaatagtcaacatattcctatgattaatttcctatgaagattactgaggatttcaaatcactggtctttattactgtcttgtagaataacgggaagtcatgggaagattttatttgtgtgagtccatttattttaggagacaccaatttttcaagcacattactcattcatgagttagaaaagggaaaggcaggaagtccctgaaaggggacaattggttgtgatctaaatattgacagatgtctgcacagagttagccatgaagcactgtgttgtttctgtgttttcggcaacttttccaggttttgtatctttaaggcccacaaaacactgtcatggacccattctttggaattttattggaaccaaaatcttaatctggagtacattgctatttgaagtcccactaatatgttgcaatagaatgtatctagtacacacttattttcttttgaataatcctcatgtccttctgttcccattcaaagagattgctattgaatttcttacttgctagcattttcatctactttagcttgacaaagtcatttgggcaactttgtgcatgctgagatattttcttgtggggttgattagattattgcccttatttcactcgaaaggtacagaaagaaaatactctggacacccaagggactcaggcaagtaaaagcaaacagaagttcatgacaggtcgggtcccacaaaggaaaattaaatgcattattctcacacaataaggttagcaaagaatctataatccctatccactctttcattcttttattctaatgagtttactgtgcaataatgaaggtagaaagcttcatcacaattctggcagcgaagggacattctccaactctatttgcaactgagatctgcacaataaaccatagtcatccatcatagagaagctgctcgtgcctaataaaaggctgtttggatagagtcaatcaaatgagcgttattggaggttggtattacagtgtcctttaggtgacggggaaggaatgtaattcggttactaaatgtgattttcttattcctctgtcccttttgagacttgaaactctgttctaacatgagcaccttggcctgacattcataatctttgtgataaaaagagaccttatcctatttcttctctgtcagaagcagttagagctgtgtagattgtctgtgatatggctaacactacaaagaatcagccctctagctgaggttacaacttttaagtttttgctattactaataacaagcaggttgaactgttgtgggaatcaaagacaagcaaaaaatataattcagtgtctgctggctatgattataggacctagttagaatttttagttggtaggtcatttagataatatttgatttacttttttaatatttgggtacattcttcaaataaatatttaaaggcactaggttgcattaaaatgatccaagtgtaagaattttcattgattctgacaggggatgttgattttttttggtggaccccaccatcaaacatttttgagactgaaataagctaatatttgttctaatattatttttcttaggaatctaataggaaaaaataagtaggtccaaataaggctgggtagcttgctgattataaatcagatgaaaagatacagaagctcttgcctgaaccatgggtgtctctgaattgttcagagcccttccatggcatctgtgaccccacactacataagagtttacagagacagcggcttgtgccaggcagttatcaggagcctagcaggtgcttaactaaacaggtcatgtcccatacagagaggcctggtgcaaagcctgtttaagtaaagtggagctgagaattttttgggattcctttttcttttacgttggaaaataaaaattgaatggctataaaataatactatactgatgaaataagtgcatttgcaagctagatttaatagactatactagtcacaataaatgctgatattgagttcttggatgtgttgttctgttctaaggagcactagaaattaaaacattattttgattaaattaatgagatctcttcccaaattacctttatgaacaatctttggcacaatcctaatgaatttgtttagtaagcatttattgaaaattcactcagcagtaagctcttctgtatgaaagtgtgcactctcagtcctttaaaaactcatgttctatggagaaagccaagtacaggagatatttgcatgaaggataaatgatccaaaatggaggaatgtctatggtgctgtaagactatgaaagtcactaggagcaagaatgaagatgttctaatattccaagcaaaaagcaaacagctctgatttaagaaaggagtttggaaaaaattaccaatttattgggggactataaacaatttggcacagctagggggcatgaggtatggaaaagacagaataatattaggctgagtgtatagacaaaaacctgtaaaacctacaactaggtttgatgaagggggaaattgggataatgacatagaaaagatggacaaagtataaatttggacagtaggatagagaggaggatatgggtagttattactaaccattaaaaatcttttaaacatcatgtcgaaagtttcttacatacatatatgaaataaatttagatggtacttccacaggtaccactggctttcaaataaaaaacccagtgtcaggtaagggtcatctcttgaattgttggtcaatggatcttcatagcctcccaaaaatgttaccattattcttcacaagttaacagtaagacactattgctaaagagaacaaatagtaatgtcataggacaaggggaatttaagctagtaccagctttgatgcttcattccaattggctagtttcatagtgctagaatgtgctatatatacttatgatagagaataagaatcatcagttgtcttagtcagagtttctaatcctgcacaaacatcatgacccagaagcagttggggaggaaagggtttattccaaattgctgttcatcactgaaggaagtcaggactggaactcaagcaggtcagaaagcaggagctgatacagagaccatggagggatgttctttactggcttgctttccccggcttgctcagtctgctctcttatagaaccaagactaccagcccagagatggcaacacccacaatgggacctcccctcttgatcactaattgagaaaacgctttacagctggatctcatggaagcatttccccaactgtagctcctttctctgtgataactccaactgtgttaagttgacacaaaactagccagtacatcagtcatactcagttgtgaactccataaagctacagtaatgactacctgtaaagatatgcctagtggtacaatagtgaaagcaatattatggaaatagccgttcactttcggattgcaattaaatatctttccagaaggctagactcatgcctggtgttttcacttaactagatcataagccccaggagagaatgaaatgctagttaatactctgctagatgggcatagtgcattcagacatataatggctgatagtttagagtaggagaagaaggccaaaagttctttcgcttccatacatctttgatctattgtcctgaattctaatattttcatatttgaaaatatttttttctgattaatcatcttaaaaatctcatcaaaacctttcagctcagctgatggattcagtgtcatggtgagataagagcaattgactccatatagattagaagtcgaaaataaatctgtattttaatgattatgaaatacaaatactgctcatcttgatcaatgaatctgcaaatggagatgcccagtccgtccctgagttcaatacctgtagaatatgcggattattaagttttctttaatttactattaaaacaagcactcagagagggcatgtggcaagaaaggcaaaacaaatgcaatgtctgtttagcatccataacaacagtgaaggtcagtatagaaaaagaaactcaaaataaacttataactttcagttaagacacttaataactagcatgtgccagtgcactcaacataagaataatagcaccccataatagtgacaactttcaatgactcccatgctttctgcagcctctaacttaaaacctacgggatgacaggcaggactattacagatcatcttgattttccaagaaggtgctccagaaacatcactgcaaatgcactgattctcctctcggttcgtggcagcattatgcagacaatgtgggagaaaacgatagcaaaatttaagaaactgattaaactcactataaacacacccactttatatactcacatatacgcggtgctcttcaaatgcaaatctaaatatttatttatcagttacttctcccctcatttccctccttaagggaatactgcattaagatgcccattttctctaatccaatggcacattttgaatatgtctatttggtgagtgacaaaaagagagaaagagagaggaagagagggagagagagagagagggagagggggagagagggagaaagggagagggaggagaagaaaagtaaaggagggagagaagaggaagggaaggggagggaaggggaggaaaaggaaggaaacagagaagcccagacagacaatttacttgtttattgatctaggttcagaggagcccataggtgcctgtgaagtagtcttcttcttctaaaacctggccaatggattatctgtcactatatagctgttgggggaagggaatagctaaatgacactaacctttacatctcttatgaagaagactccagaaactttggtgagttattctctgcagttctttgtcatctcaacatcactctaaatttatacaggtttctggatgttcagttttaccaagacaaacaaccaaccaaccaaacaaacaaacaaacaggatatgagatatttggagctcttcacacctgccatttacaatatatgtgaccctctgagtctaaatgcagtgatcctgaaatgctaccatctaaactatcaacatatgttcgtagtaactctatcacaattgtctgcaggacatggtggagtctgctttagccatggcttcatgttgtaatgctcctctatataacttcattcaaaaggtgacttttcttattttacagataatgttaaatacaaggttttgtagaatttcatcttgaagtgtcacactctcatcttccccaattctgtgtctgcttgttctgtcattgatagctaagctcaactagcatttactctcatgaccctaccttgtgggtgtgatgttgttgtaacgtgtgtatataggcatagcagactcatcctcacttttgaacattgtacaactggggatgaaaagaaaaggattctggtgtaaccaacccccccccccagactccctgagactcctcatctccttagcagttaattttgaggcaagttgagcggaacattgtcttaaatcttaaatcttgggcttatactagatccggcataatgcccagaggagatcaggatgctattgattgattctgtgttatattctcaggagtactatttgctagtttccatgctaagttctggctgagtagtttagagaacgttatatcactccaccgtaataatctcagaacaattttgaaataattctcttctccatattcttaaaagtacctctaagacttgaatgttcctgtgaaaacaaaatatatctcacagatagaagacacaagagtcacttgagtgtgccttgggggatccaaaggaaaaaatgtggtgcctttataggagaaataacccactatcttagtgcataatgcattcactctgctagccctttgatattgttatcacgtattctgcaaatggccagtgttaaagatagtgaaaaattcaagtgttgttatttgacttctgccttgaagaagccttcatacttgacaacacttgggcataagatttcaaatattgtgaccttccagtggtgcatagccaagtcaagcttgctatagaaaccaaaaaaacacaagacagcagtgtaacccattaaagcaggctcctgagagaaggggtgacacatgttattggctcagtaataacagaaggtaactcagggacccacaggatattacaaaatagcctaaccttggagatgcattgatgcctttcttggtagacagaagatgtactgtttagcatgctgtagaatgttcatgaaaaaaaattagaagacagatttatagaatgattaagggtttcttaagcttttgaacattaaagggaaaaggagtccattgaaggtatttgaagggttttgaagcaagaagtttgttccccaaaattttgttccccagagctgcaagaagtaggtagggagatagatgctcaagagaactatgcaacacaatcaaatgctatttctcctatgaaggtaccaagcttcctggagggacatagtttctcagtgtgttttattaagaggctggtaaccacaatttggctgttccattctgaagatgagcagaagaacctgtggacccaggccaggctgaatgacgtgagtgcctccccgagctttgcattcctacctggtatcacccttgcctgattcttcccacagcttttgaaaaacacattgcgggcactgggagaactcttctgtgaggagtaaaacagaggagtaaagactggatagttgattttatttgaataatagtttcaagcccagagtttggtgaatattagacagaatagacagaaaatgtgcttgggagatgcatattagtatgattttaggaatttgtacacatcttaaaagatattgtgggtgccaacaggagagttccttcaaggggctagtttagtccttctagtgtgaattagtacaggcttccttatagtagttctaggtataagcaacagtactgtggcattcagaggaagaaaaaataattaggaaataataatatatgaaccgttgaacatttcaaggaggtactattgggagtggactatttacattccaatcagactcttctttgtgactgaactctagtaagcctaatgaacaaaaatgtataacaagtcagaatttacctgaaaagttaatagtcagctcatcaaagaaaatcaattttacaatgcagaatgttttcaataccacacttggcttaaattgtatagaggcacttccatccgtgcacttatccaagtggtctttgaaggaagtttggtcaacaagtacaatgttttatcattttttcattaggtgtaatcaagggttgattacacttgcttatggaaggaaaagagacagaacaaactgtcaagtaatgactatcctcattaggaacttaattaggtggttgttttcatttatatttttatcttatacttattaagtatctattacatatcagaattgaggtaaagataagatgcatatccatctgtatgctctagaaagtggtaggcattggatgttgaccttgtatggttatcacagttaacatcttcattctcccaggggttctgtattaaatggtttttctagccttagagtttggggaaaattccatcccagaaaaactctatgtggtcttctgagatgtgcttagaaagcctgtcatgattacaacatgaatggctgcaatcttttgaatataatgtaagactcaggggcaatagccttgtttctttggctcatggtatatcccatgagctgaatgtattgtaacatagtaggcatttaaggaatatatgttatcaataagtgaaccatctaaagcactctcagcctttaaggaaattgataccaatgaagttttcaaaagattaagtacagaccatacccgccagagtggatttaatttgaagacacaactatttgagctagttgaagctaattattttctcatctgaatttgttttagaaatctgatttgaatatatttgtaagtcactaaatatatgtgctaaaattattttctcagttattaaagtttaggagggcatgcattgttgagataaccagagaaaccattagaatacccttttgggaacactgtgagatgggagtaaattcccataactaagagagttgatgggcagcattttataaaggacatcactagatcctaaatatgtctattctcttttctttatttcaatttgtcaggactgtactgtataaagatatcacatttgaggatgtgacctggggtgtgtgagctgtattcccatttcatacagaaatccatcaagcttggttatcgtgtttcccagcctctggaagattagaagaagaaagttggaaagaaagctgttagagtcaaacagatttatggtaatgggaaggtctggggaaaaaaacacaaagagggggctagggattcaaaaaccatcatttctgaggccatttgggataaagataaagagtcttgcatgctcagaaatcctcactgtgttgcattggcaacactgcttgtcagtaatgatggctctgggcaatcgagaaaaggttaaaacaggtttcttcactctgttcaaggagaagacataggtcgtaatacatttcagatactgttgtttgacttggctcttacggtaaagtgggcaaagagatcctaagagtgcacctgtgtgtataccatggctagaaaataaaaactaaaaagtagaatagaatcaggaatcaagtgatatgctaggattggacaatttgtagataatacaattatcttgagatgatgcctctttttattagcttgctctcccctttcaggctcccctccgtagtctcattctcaatttgaacttctgctgatccttagtaatttctgagtttttccagaaaaaaaggtgagcagccagtctctgcatgcatggctggttaacctcatttcctgccaatctgagccaatagctagttactaccccataactagacacaggaatgcatgcatttgcttatctagtctggctctgacaaaccggcactaagaaagtacagataagaaggctttatgataactttattaaagacattgcacaaatctccaagcacatgaacagatgaaagtttacagatttaatacaagctttatgtctttagaaagcttgtttgaagtatgcatgtattcaattaatattgtgcatagaaaaccctactctgcatttgctttctataggagttctgagtgctaatgtaatattactggtgatgttatcggttatttttattccattattaatgttttcccattcaaaaatcaatcaaaagtgaagttctataatctccttataataaaacattccacaaagaacatctttctagaatcctctttgatcttgaatagatggatgtgcttcaccacagatcttgacagcttctaccacttctaatcttgtgctctgaggtgctcttccatctacacagtttctagaacaggaggtgtgcaccgccagtgataccagagcaggaatttgcaggaaggatctatacaaatattcggagcaacacttcatcttgcattacatatgaaaaattatccaacaagcatgctatgcggatgcactaattgcctgtcacccagtcgttgtgttctaatatgttataggatacacccagaagtttttacattaagtaagagaaaatcttgggcagataagggataaggtaaattattttttattattattctttcaattaaaactaaccaaagcagacataggagatgactttaagattgaggtagtatgtattttgcttttgacttaaatataaatgatttaggcatagagctttccatgatttttatgtatcaggaatttttgattactacctaattaaggttattgaatacttaccatatgccaagtacttttctgaatgttccaatatacctgttaattgtattcctaaccgcaggccccctgggcttggaacttctgaccttattccacggttgaggaagacccaggcacacggaggttaaagatattgcttaggatcatagcactgctaagtggagaaactagactccccacccaagcatgcttaactgttgcacaaaagatgttaccgtgccacagggaattaaaggccaaaggccagatctgaaccacttaaaattccctgggtccttgtcaaaatttctcatggtctctatgcaaaagccatttcttatagggtcaaagatgcatgcttcaggtcatggaacgggttagtgacaaaggaagtttagacacagacaagaagatatgaagtcagcaaggtctcacagttacagttcttgcctgaatctagtggttgagaggtaaacatgttctatgcttcttttgtagaataatggagaaaaatagatggtaagcacaaagggctattagcaaagacagactgctgaaaggtgaggggagtatgtgggttggggagcagggcggggggagggtatagggaactttcaggatagcatttgaaatgtaaatgaagaaaatatctaataaaaaataaaatgtttaataaaaaaagaaatacagattcccataattgaaacaaacagatcaaaacaaattagaattacctttaaatttcctactaatttaggtttaaaaattcaaaatgagcatattatgcaactgcacttaaattatttagggagcattaagacacatgttaatatatattaaactatatatacaatacatatgatatgcattaaagtaaataggtatatacttaaactaatacatgtaggatatatgtatgtaaactaatcatatgtatatagcttaatacatatgtgtattaaatatataatagaaatctatattataaacacacacataaaaattaatgataaacagtgaaaaagctggggtgaacttcaaacagtagaaagtatttggaaacagtttcataagtacaaaaatgcatgatttgaattgtctaatggtgcttgtaatttgcacagggattgcacactattgtattcctgtccatcttgcaagtacattagaaatgttcacaataagctacagaaatgcctaggctcttcatgaagattggaaatgttatagtcaaagttagtgtcaaggtctttcaaaagtaaaggaaacaaaattaaaatgtcaccttccaagctaaatggttattaatatttcgttcaaaggcatgcagaataatcaataacatgaaaagataaagcaattatcaataaacgaaagcaataacattacaaaggaaagtattttagacaaggtgagatcagctggtgttttatgttaatacagtaagttgatgaactgtgtagtgaccagggtcaataaaagtggaattaattttataatgtaattatttctgccagtgatgatgaactaaaaggagctgagatttgggaagaagaaaaaaatggtcttatggttgggatattctctgatcctgtaaaatgaagctagacacattatgatgaaatgcattgttcctaaacattcggttttacttgccaaaggcagccttaaggtgctttgtgaacactaagtaatatgcatcttcagctgctgaaaatggattttaatctttgattccacgactttaatgtttcaagattatctggaagatcaggttttttttttttcttttttcccaaacctcatataagagtattttaaagttttatttcctccaaatattctacttgtgaaaataatcactaggaagaaacatcaagacatgtcttctttagagttttaagcttttaagcctaaagctgatgaagagagaatctgtcttatactatgaagcagtcagagctagatggtgaatttgaaaatagacctacctagggcagagcagctgcatgcgtccagaatacagacgcatgcatggtaaccattcatctatcattcattcatttcctatgtgtgacttaatgaatgggaaaaagaaatatttctgctgatttactctgtagccactaatttttcctccaagaaactacaagttctttcctttcttgaggacttgtcctccttggcaggcacgcccatatctggagttacttgcctcagggttggcagtaggctcaggctgaacttgaagtgactgaatgaggaaaaaaactcaatctatcaagacagtcacaaaggcaatctgtcagaggaaaatgtcttttatgtgaaattcagccggtacttaacaacactttaaattcagttgctgtacattttacaaatactaggagtagcacggtgtgatgtgaaatctattcctgagacattaaaattttgtacagtttaaaagctactggccattttattcaattactttggtatgcagaaatgcatgcttaattaataaaagcaagccataatcatttatcttgtaatgaaaaccttttacagttagccactaatgaagatcggactttgcttttccaattgtgcctgtcaggtgatgcaggagcaacctgcatgatgactgaggaacaggcaagtgccatgtgctacatcatttggaattgtcattaagcatccacatatcaattatgttgcactaaggtttattaatgatgtacttatcaaatattcattttatggcactaacatttaaagaatgcgttctactgagcctaatggatctgtgcttcgacggcccgggttatttagtggattaatttgagggaacaatttgaaatactgggatccaagctgatataatatgtcatgttttacaataatctagcagctctcctgtttggagacaattatgtcttgttgatagagggaaggttttaagtgtactgtgaacaagagcgggtaggctgtatccacacaaaccataccttttgtttgctatcatatggatagaggagatcattattgtctatgaaagtaatggtattttaaaaataaactcccgaatagatccaatggatagacaaagttgcatacgtattgatggtcttctgatgtggcttctgtttgttatttgttttcatatgctacccatttatttattgctatttttttgttttgaatgtgtgcatgtgtgtttgctgcatacacacacacacacacacacatatatatatatggaagtatgaacatatgcctgtttatcaagacagtgactaggtggggtgtcagatgctctaccctatcactatttaaatactcccttgatgtacagtctctcacacaatgtggagctcccatttacactaggttgacaacaaatatgtcccagaaagtctcatgtttccacaatgtactgcactgtggttgtaagcacacacaggaactgaacaagcatgacttgctaaatagatgcaggaattagaactcaagtcttcaggctaatatgagagatgagatctaaattctggtctatatgtttactcatatatgtgtgtgtgtgtgtgtgtgtgtgtgtgtgtgtgtgtgtgtgtgtgtgtgtatgtatatatcttgtgtataaaaataaaactcgtctaagcatagagcataaagctttatatgctcttggaaattttatctctatggaccaagtttcatatttaagtacatatgcatcatttttcaagagtgatagaaactcatgccaaattatgctgcttttataatactattgtttctatgtcactatttttatagtttcacgagagagacatcagaagaaaacacccacccaattgcacattaatagctattttaactcttgagtagtttttatataaatggataaggcaaattttttcatggtagtgatgatagacaaaagaaaatgtcctttgtataaatttgggatattataaggtttataaaacctgttagatatattaatggaacccttttcagtattttaagttacttaggtattgagtgacatatttgtaaaatagagcttaaatatatctaatgggactcaaattttaaaaataaaccatactttacttcatatctacatagggtcactctgtcatagttttaaacttgcctgttgctgtaggaaagcatttaagcaactgacagagaatcaaatatcaattacttataactgatagtgatatactttatgatgcatagagtacgtgtagaatcaccaactgtgacttgactcaggtgctaggtaactagacttggtcttcctggtagctgccgcagaaagtgcaagtggcacagagttggatttggaaatccccgttttctaacactgcctgtctgtagtctttgcagagcataatgctgcttcctaagggtttgattcccagggagaatttatctagcattttcattttcagactcatttttttaaaccagggttttctctctgagttgtattgcaatgaacagagttcctattatgctgcactttatggaaatgtaacatgccaagctttttgtagaagcttttcattcctgcttctctttgtcacagaaatctctttgcttttgtagctcgagtcacttgcaattatgaattgtgcattttaaaaaattcatcaatggaatctttgattttaaaatgagctgccaggagaaaaccagaagagagcaagtggaatttaatgccacacgacagctgtacagaatcacaaagacacctcgctcagtgtctcatacgacagaaataaaatgcagcgatacaggtgtagtctgaaaatcgtacctccagctttaccttgtgtaggagtacacagaaaaactctgtataccacagattaaatatttatcatttttaaatatagccatggtacacacctagaggtagcaggtacagtcatcacatacacatcgatagaagagagacatattgaagtattcatcttttattgatgttttgtttgctttaaaacagggatctgactttctctagggtagctgaatgtagccacggataaccttgatctcctggttattctgtcttcagctctgccattctagagtctgacattcagtaccacaagtgacacttttattactttctattgtttttatgtggcatctctatttatcaaacagattttttttttaattttagggttactattagcaacttgtgctactaacaactttgcattttatctaaataaaatatcagagaaagaaaactgagttatacttatgctttagaggattagcctgaaagggagcattttataatatggagtttggtgaacctacatcaaaagcttcaactatttgcagctcagatacccgcttattaatgaaggcactaacagaagggggctccgcttctagaaccctcttaattcttttgctctgtcatactctccttatccctctgaccaactgggaaggagataggaaacaggtacaaaaatctctcatactctcttcaccccaacttctcatttttaacatcagaactctcgttgaccaaaattttcataatttaatgacatagctctagagactaaatcagaatgaagaagtcctccattgatatccatcaactccaagctgagaatggagactcactgtggaagtttagattacctctaaacagccattagtccttagcaaatgaggcatcctctcacacacaggttctaaacttctcctttaaagaatttgtgctttcttacaacacttctgtcacttgtgttctagaattctgaacacctgttggctacccttctcattttttgacctccacattatcaccagtgccttttattgtgtaggtgtctaaccactgatgcacctaacactgagtcttatatagcttctctagaaaaagttattttcatagtagcaccatccagtatcctgactttcgggtatttaaaatgcccctatttttatgcttcactcaaacatctcctcacatcttccagttaagcatgggagtgttcattgacataatagatgtaacctcttgtgacctaaacacccaatcttcctctttcctcttcctgctccttctgaagtcctctttaatttagggcaactctgtgctttcaattgtcaatctccaaactctagtattttcttggctctctattcattcaggcataagccatcaatccagtcttagagtctatactgtccatttgtactcagaatgtaaggacttctccctgcttccttcaccctttactctgcggtcctattcctcattgcagttatcttaggaactttttgatgagtcccccagctccaaggtttgccatggtaaaatattgtagctttagtaatatgtgacatcatcaacctttaagcatgtccccataccttcctagttcataatcttctaacacttcccatctcaatgggagtaaaaccaaaccctttccaatgccctaaagactgtgtactattgataccttcatttttttttttaaatcttgagccctagtcatccccatgctactctcgtttcccatgttcctgatacactgacctattttatttatttatttatttatttatttattatttattttacctaatttcaattttaacaccaactttctaactgcccattgctctgctctgcttctcttagtcacagggtgagctcctttgcctcctttctatcttatctaacctgtccctttccctatgagccactgcttaccttttccttttccaaatgttacgactcttaccttttctctctctgccttcatttatatttctccacgaggtttactgtatattattatatgtggtatatattcaattgatgatgactggtgatgatgatggtgatgatggtggtgattatgatgatgattgtgatggtgatgatgattttgcttccacttaaatataatatccacaatatcagcaatttgtctgttttccttgcttattctcaagtaaccataatggaaagtgctatatcatttcccgaatgtaatggataataggaatcatcattttatatgtgttatttgatttctcttatagtttcgaatggaaggcctgtaggagaccagaacattccttctattctccactgccttagtaaacaagccctaatttctccagaatattatgtgaagcatcatcatgttacggctgccatgacttttctttggctacaacctcatgtgtcatgtaatcctggattgcatccagacttagccaggtgaccctgcctactaactgaactttacctttttctgaaaaaaaaatgcccatcaccttgattaggaaatagaaagccagagacaagaagtctagtacaaatagtaggttgatagaagaatggatgttctgtgtctagatataaatatagcaaacatctgtatcctgaatacctagacagaaattaagaactattctagaaccaacacagtctcacctcacttaagtgctatcactagtccagtcttcatctgacaggaaggagattgagatttaaaaaggctaagaattgatttcaagtctcaaagtcaactcgtatgtactgattgtagaattttgtccccaacagttcacattcagtgcctttcatcatgggcaaattgcagtattgaagctaaatgtagggataggataggcttagtattctccaaatggattattctccaagcaacaaattaagtactgagtacttagcagagaaatcaaaggaggtttgtttcttttgagacagtaatccatacttgatgggacatattatatattcattagtaaagaataactatgggccatataaatcttcaatatttaaatagctaggaatgcgaatctaataagcctttgaattttaaaacttgttgaagaatgtcttaacagccttagtctctacaactcgctgttatagtccaaccaagtttgaattaggttgttactagtaattatactttcaatttctactaaatgattagtatttcatgggtaactctatattttttatgcttcagctggttaactatgctacatttgtggcttgttgaaagcaatggtgtcttctctatttaattctccaattctcctaaggttcttagttcttttctcttcaaacataatgttctcaatatatgttcattgaattcttaggtagagagctgctgtttttatacatatccattttgaagggtgtgatcaaagtaacagtgtgcccagcaacttatcaaaagctacgtggcaaggcatggaatcagagcatgcaaacatcaatgcctgagatctaaagcatgtagtttagtatttggggcctaaagaaggatatccaattgttagcagaagatacacattaaaagaaaaagtatgacgctcctttctgcatagaacgtgaggctctatagaattaactgagtatattcattagagttaaggattgctggagtgccatcagatgtcgacttagagagcagagcaacctaaagcagcagctctatctgtcataatctgctttacacattccagaggcgaacacgaagatctcccagcattagcatgcacgtagattgttgctgattttcatgctccaaggtcaaaacagctctttccattggactttgaaaaagtacgaagtgagagaccagagaagacacaaggcactatttgtatttcttcttcctctcttcttcctcttccccctccatctcttcttaatgcccttctttttctatgtcatgtctttttttttttttccttgttgaaagtgcattgtttctgctggtgctggcaacataaaaggcttgttactggagtaactgaaaaccttcctgtgccatcacaggtgttttgtattttttttttaaagcagaagtaaccttctgaacaggtgagtctataggctctgaaagagactatcattggtctgagtatttcaacggggtattattcttctggactaagatgacctactgtcccagtgtttctaaaatcaagcagtctttcaggacacataacttctattgggcttacaagagtggcaggcccattgcagttcactggttattctatgtagggccacgctactaagcttttgatagcttcagcctagtaactcagaagtacctgtgctgataaatatttacacttgctaattgtttagaactggtctgcctgggaaggcatatgtgtttcccaaaacttggtgaagggccagagttatccaacttaggaggaagcagtgcaagctactccttaatacggagacacatctgctattgattcttttattcctgtttctcgtggtaagttaccagttcatgtgtcggagcccaaagaatttttttttctaagaatctgttctgggctcactatctataccaggcctttaatttccttaggaggatggtcattagagacacaatatcctcttttgctgctcagaggacttaaagcagaagcatcacaatggttccctaaaaggctgccactcaccccaccccctccctcccccacccctacaaaggagcatctgctgaaggaacatctgcctaaagtgagtttgttccagccaggcttactagcctggccctttcaaatctgcagttctttttgaaaagctttctttaaaagagcaatatccttgtcctataacttttcttgcttggttaatgcataaacactgtccctgagatgtgtcactgtaagactgcccacattaacaacccaattctcaacttaaatttttagcactcttcctgtttttttcctgtactcaaaatgataagatttctttttattctcctccaaatgcagggaaaccaactggattgtaagttgcaccggttttataaatatgatgagtttctttcttcaaactcagttgatcttggcatgtttttaaaaagtcagtagagcgtggattaatacatgttgtgatcagagttcataactgagtgtcttgttctttggtaggcatgtggcttagtagctgaagtctacaaacaggtttgcagaagccagatgagcggagaggctaggagtacatctgcttctcagttctcagctctttatagagccatggtgttttatagacctttcatctggcctcattccatgctttttaaatagggatgtacagcagggggctgtgagaacgatggataatatgcccatggttgatctcacataaaaataacagggtttcctaataaccacattattttatgctaaatcaaccatgcccgtgttgtgaaataaaatgaaaattcacataaaattgtaatgtagcccaggaaacctcaaagagcatttagctttgagttgggaatgatgcctgcccattgcatcttctctgttatttagagaagaaactgctgcagggtacatctgtagaggggatacttcagggagatagtttaaaaatcatcctttctggtccaattcttcctcaagcttggaactgccacattctttatctctcagaggactggctgaacttgattgatcttgtagtatttgtcttgtctgtaacagtaatgttgactctcttaccaatataacagaattcgaggatgacttgacccaacagtttcagggaaaatacatttattcatttgcatctttcagattagaatggtaggtttcttcagtttccacgatataaagagaatgtatttcatgtttcctgaattgtcacttcatgccaaacagatactcttttgagcatcttatatgcattttgctaacaacttctttaaactgtttgtgattgctctaactttcagtatgagttgaacaggaagcttggaaactgtcatcaaattttcagagatgagtattatctgatcagtgacgaaatcagcattccaaaccctgagagctcaaacttaattaatcctctaagtcagtcttttcttgtttcttagctgaataaggggtgtgggaatattttaagaaaaaatatttgtggtgtctggctgatagctatagacaaataatttatatgcatatgcattcatcataaatcacttaagacacttagtttgcttactcattgggcatttgtgccaggttcaataagcacagggaagtcttacagagtagctcagggtctggtgacattgacagacatataataaaatatgaaccaatcaaatcatgccagaaacaatatatgctatagaagagctggtgagaaaatgaagccccagaatacattttcacgtgggtttatatttcaaatggagaactgagaaaatgtagtgaccacaaaattgttcctcagaaatgactgatgggagttgggagtatgaaaaccaaagacaaggatgacagagaaataaatcttaagtaagtctttcctgttccctggacattccttctgggctctttgcaaacacttaattgctacttcttagcagatttgaaaccaagtttccttacctaaccttgccccatgcctttaagcaaaaccacatatttatggcagtattttttctcaaccatctttttgcttttcctacagatcatatgaaggcttactacaatgtaaaatttttatcaatgtaaatagttgtttaaataaaacagatgggaaaattgctattctctcaatagacttgattgagtcaaccttcagagtttcaataatgtctattcttctgattgcctctgacaactgctgtccatacctcatttggaaactcatagagctgcttctgtattaagctgtcactatcctgctacaacttccttatgtttattttatttttttttagcaaccattttctataaattgacagaaacctagtttagactgactcttcatttgaagtgcattgctaaactttatcatatggtcgtactcactatttgtcttagataatatctttttctgtgcagacatggctacctaatttaaatatccagacatttattttatataaaaaaaataaacagaaaattgggaggtggagtttacagtaataatgagaattataaattcataaactttcattgataattatggcattcaattaagcttcacaaaatattgagaattctagctgcaattagatgtttatctgactggggatagtgtatgtctgaggatacatcaacttctaaactacgaatatctcagcaaacaatcgtacatgttgcagtaaaatatgagtcagtgggggcggggtctttgttctatatagtggctcagagaccataagcttctttacagtggtctacagtagctaagcttccattggctctgccagtacagatgtcagaagaaaatagaggtcaataagatgccagtggcagtgtctgagaaagggcaattcttggcactatcatatttattcatattcttagggcatgtttcagtacaaggtagaggtttctgggacatatagcttgctcttagggtcaagaggggaaagaaatgggacacacatactcacagcaaacacacacacacacacacacacacacacacacacacagagtatattttcatgtcacgttgcttctggcttaactggctaaatgtatctttgttttaagaaatagaacaaggattaaaggcaagtatagaatgctggaagttgccaaattctctttgagagggatacatgcacagggagatagtcgttgatgctttaggaataagcatgagtcttctcagagtatttctttgcccattatatgtatgtctattgtgggctatgcaaatatgtgcaaaattcactttagagtgtggctacaaatagccttgtcctactgaaattgggttccagagaatttaaagaggagatttttttcccctacaacatctagactgtacttgccagtattccactttttatccaatatcctagtttctacagttcaacttttacatctttcttaactctgaaagttgcccaagtctgttaaccaggtccctagattctggaatcagtgtgataaactgttacatcatagtaatacccacagataggcaagagtcagataataaaataaaattacagaaacatttcttggtggaatttttttgtttttttgtttttgttttttctttcacttaagaaaattttcatatacataaactaggagtgtcaattgttttccctataaatatccctttgtgttttgctgaatctcaacacaaaaataaacattccctagtgggaaccaaaatatcacatttcctgacatgtttcaaacagtataaagctgggggtcatgtttggtctttttagcacatttattgtctttagaattagatgttcagtgctggagggcagcggctctacatttcaaatcaaatttcatttcctaaacacatgaaaggtcaacgaatccccattcacagtaacaatctgaatgtgcagtcgagcatttaagagctggtggtgctgctgaccaccaagtactgaggcaaacctcaaacttttctggggacaaagaattatgtaattccacccctctagaacattacccccttcccaattctctgactgagttctttggtctgtaaaagaaattacaaagtgaacattgtcagggcatgttatttgcagttatcatttatgtatctacatgtttgattggaataaacaaatcatttctagagcctgcattctgtcaacctggatacatctaaatgaaggcaacatattattagttttaataaaaaaaaatcacatcacggatgcctaacacaggtcatgttggaaagttgaaatgcatttctgaatccaaagccctgaaagtgaaacaagaagctacatggagtaaaactggtatgaacaggtagtaaatacacattaggatgttgtgtaagaatgcatcttcctctcatgtactaccgagctctgtaatcagatgagcttctttttattcatgagaatcactaatgaaaaagtgtcactctcaatgattttggaatactttatgtagctttgctgaaccttgagttttcattattgtgcctctcctatggaaatagtcacactgtcttacaggaagggcagagaattgaaaagagtctgtaacaatgaaaccagtttccagggatagaaaatgatgtcattgtttcccgaggctctaacagtgaaggcagtcttctttaaactatataggattgctcatctgtccgaggctgccagtcacaagagaggttcattccagagtctttgttagctagactgtcatccaactagttaatccctgatagataaaattctgtaaagcaaaaagaaagaaaaaaatgaaaggaagaaacaaacaagcaaagaatgtaacagagtttttgagtaaggcatatttttacattgactctttcagtttggtgacacgccagaggtgccatgatattttcttgggcctttacaggatacacctccactgcctctctcctttttttttttctgacttgttctccagagatctgcacttaaaccaagcatactcctctcttcaccacctgcaccactctggcttcttgatcaagaaaattttctgccaactctctgattttatgcagttagacagacctcctttcttagcagggattgaatgagatggccaaattcggtaaagggatacaagtattatttttgaagtaaattgctcctttgactgacttctttaacacatgttatgcattttcttcaaaatgtttctgtttcaacaacaacatgaacactgtgataatttccaaaatgtatactattctttgaaaatgtgtacatctcatttctgcttgcatgtctgtactttaaaggtctgtaagtggccatagtctttagccaatggtacagttaatgattagactttagagtagcgccaaactgtgatctggggtgcaagagggccagaggttgctttaataacaaaagtaagttattatgacattttacatagtagaatagacaatctaccatccactggattaagtttagttctttctgttttaaagacttatttattttcattgtatatgtatggggttttaagttggatatgtatgtgggtgtgtgccatgtttgagcctggaatagagggtatcagattacatggaaccgcggtcacatggaggtgtaggctagcatgtgggaggtaagaaccaacccttgttcctctggaaaagcagcaaatgctgacaactctttggcgggttctttgcctggacaactcattcttactaccactcagtgacagtcagcataggtgttcaaggcataattgagagaaaagtgtatacttgctttttaagcagaagcctgtgtagcatttaaaatctcttgagatgagtagtctctgtcacatgatatgtgtatgtgtgtgtatatatgtacacaccacacacacacgcacgcacacacacacacacacacacacacacacatacagtgtattttatgtgtattttagtcttaccacatcagtagtgtgagttaagaaatggaagagatgtctgataaaaaattttacaattgaacttctattcctgttgctctgatgccaaatgatatgtcatttttcctgaatcattgttttactaaaggacattccttgggtaacttgatacaggtttcttggcctcagttttcttgggctaggtcggcttgcagcctattgtccaaatgtcctaactttttcagtgaagggtgatattcaataatttctaagttcacgaagaaggcaatcagctaaatggtgaggtgctaccgtctggtcaaatgagaaagacaacaaccttggttaaatgagtggcttccctgcatcctgtcttccaaaatgaaaggtcattcctatctatgctaggaaagttacaaaacagaaagacacacacacacacacacacacacacacacacacagagagagagagagagagaagcatatacatgcaaacatacatacatacatacatacatacatacatatatacatacatgcatacatacacagacagacacacacacacaaggtgaatttccttgaaaagtttcttccaaaaatccttattagaaccatagcctggattggggtaatgcctataatcataatgtcagtatgtggcctgtgtgatacctgagtgtcagaagttaatggccatgctcagacttagttactgtatgaggccaaggacagcctggaatatgtgaaactttacaaaagagaaaaaggaaggaaagaaggaaggaaggaagaaaggagggaggnnnnnnnnnnnnnnnnnnnngaaggaaggatggaaggaaggaaggaaggaaggaaggaaggaaggaaggaaggaaggaagactaaatgaaaactaaataaaagagtttcgagggaggtctgctactagtaagagaatttaatttggataacttggggagaaaatgattctattttttaagacaatgtttacagttagataactgttttacagtgttcttttctgcctgttcatagctccttggaaggacagtgacctaggaaaccgaacaggtggtgccatgtttccaatgttagctgtgtgactataaaacgtcttcagcctttcgtttacagtgttttcataattcacctgctgcaaggaacagaaaactttggtctcctatctcagcctaaagtttctaagctcgcctctggaatcagtctcagaatctagatcaagggagcagatcggtatctccaaaaacacataagcttcctttccagtttacctttctgactccagaaatttaccttcttgctctgcagtcactgaccaagtccatcaaaactgatgctgtccctgttgttaccctagaaaccatgattatagagagtctgttcaaattccttccattgccctctcctgatatacttccaagcatacccatgaccttgaatttagcttataggtcacactttgtttaagtgacataataattctaaaactctggcagtatctttaaactttttttttcttttttagtattaatcttgaaccttcagcggtgttgactgacacaaccctgcattaagctgtacatgttaacaatttaaggaggagaagcctactttgatatcccatgcttaaattctaataggtctctccaagggagaagaagccatgtagccgctgttatcagagtacattaggactgaaggaggccatcattggttacagaaacttagaggatctgaatgattaagaccaggataaagggtgacacgatcaaaaattcacatgtaacaactttccatgattccttcctgtcttctccaaaggccatttttaaatctcaagctttcagtggtgtcaaatgaagagtgtaatcgattttaatggtaggtcatgtgttcttttgatctcgactgtcttacttggggatgaatgtggaaacttctgtcaaaggctaatctcagcaggctgtgactctccaggttccagggcagccatttattcactcagtgaattttataggtgataaagcaggggtctgggaaaatgatgaaaattcttgaaacctgaaccacttggtggagacagacccagggaatatccctacttctggatttccattcagtttcctttgtgatgacacaattgtgttagggagctggagggtcagagcttctgtacctagaggacagggagaaggagtcccctcccactgagtcattctgggtggttcttatcagggtaggcaacttgatctttaaaactgtttttattttcggagtcattgtcttcctaaaatttgagaaaatgaataatgcctctaacagtagttattcagttagctttctccatctgaacaagagagatagaaacgttatgtaagaactgatcataattttagttacagggttttaactctccacttccatgttatcaaacaaagagactgacagctaatcatagatactctgagtagagactctagaaatgcctcacttctctgggtttaaatttcttcatctctagagatcaatgatacttaggccacattataaagacatttcaagtgcccctttactgacttaaaatatgttttaaatgtgtccaaatgtattctgtgagtaccacagagtgaaggtaatgtgaaaataactgcttataaaaaacgaacacaaagttccaatagaggcagaaagtaacatgtgcagtgtggataataaataataccattaaatccttgtaccatccctgctttctgtcaagataaataatgtgatatttattgctgagcccataattactttttatgcctgaaacaggaagacattggagctgttgctacaatgtgttttagtcaagtgatttttccagtgggtgacaaacaaggtttcttcttgagtataaaaaaataatagggatccctgcccatcagcatctcttgaaaattaatctccccagattgaaagatgctccgtttagatattggaagaggttgattccctgtcatgatgtctgagcttcatggttgttggctatcacagtcataaggcaggagagatcccttccagtatgaaggtaaaatatgaagaacaacaacaagaactcaagataatacttatgaatttccaaacagtgtgtatgttttctctaaacacttgagtgtgctttagatctgaatttcaatgagctcatcccactatagcatgttatgtatctggcttgtgggataggagaacatttttggaatctaattccagagattactttctttcacattccaggagagagagcagtatcttagttggtttgacaatacacatttcctaccaagcgtttagtgataaaaaacaagtaaatgttgatgttttgtcctacatttaagacatccagcctaacattgtatctgaacattattgtgttcagattgatgtcaatatcattggattataattcctatgttttcctcaaagcaggaaaaattagattttattgacctgtagctttatgctatctacttttagttattgttttcccaatgccctttcaacagatgctccaaatggtcaatgttgatgttagaggaagtatgctattcatcttatgatctgaacttatgtcttactgggaaaagaaataaaactcagatatgagatagttttttgtttgcttactttttatgaaattacatttttttgtttttgtttttaaagatctatttatttatttatttatttatttatttattatgtgtgtacactgtagctgtcttcagacacccctgaagagggcatcagatttttgttatgaatggttgtgagccaccatgtggttgctgggatttgaacnnnnnnnnnnnnnnnnnnnnttttgtcctacatttaagacatccagcctaacattgtatctgaacattattgtgttcagattgatgtcaatatcattggattataattcctatgttttcctcaaagcaggaaaaattagattttattgacctgtagctttatgctatctacttttagttattgttttcccaatgccctttcaacagatgctccaaatggtcaatgttgatgttagaggaagtatgctattcatcttatgatctgaacttatgtcttactgggaaaagaaataaaactcagatatgagatagttttttgtttgcttactttttatgaaattacatttttttgtttttgtttttaaagatctatttatttatttatttatttatttatttattatgtgtgtacactgtagctgtcttcagacacccctgaagagggcatcagatttttgttatgaatggttgtgagccaccatgtggttgctgggatttgaactcaggacttttggaagagcagtccatgctcttaattgctgagtcatctcaccagcccgaaattacactttttatacaacatatttagattaaagttttccgcctaccatctcctttccacattcccttcattccccttcaaatacacaacctttctctttagaaaacaaacagatatctaaataataataaaataaaatgaaatgaaccctgtatggactagtgtttgtggcgctggaaggcactctatatgctacaaatggggaaggtaaaggccaaaccaagtacgaaccctttgatctatcatgatggctttctagcaagattaagattttgagttgttcaatcaccctgccctgttatagaaaacaacttatccaaagccactcaccactaattggaagctcagtcaggaggaagctgagaatccttttgttacttcaattactcttctggatatactacctcagttttattaagtgtggaaaggtgaaaatgagtaattaaacttttaatcccatccaaataaatgcgtttgactacagcagcatgttcacaatgtggcagcttcacatgaaacattataaatagagaaatcagtataatttcaacaatgttgaactagtaaaagaaaaaaaaaattgccttcggctcagacagcatttcacatctgtttaattaaacacacacacacacacacacacacacacacacacacacacacgaccacgaatctgcattgaagattcattgtgccaacagccaggtgatttgaaataaaacctcaaacagtttctgtcaggaatgaaaagaaagaaagaaagaaagaaagaaagaaagaaagaaagaaagaaagagagagagagagagagagagagagagagagagagaaaggagggagggagggagggagggagggaaggaaggaaggaaggaaggaaggaaggaaggaaggaaggaaggaagaaaggaaggaaatgaagaagaagaagaagaagaagaagaagaagaagaagaagaagaagaagaaggaaagaaagaaaagaaagaaagaaagaaagaaagaaagaggaggaaggaaggaaggaaagaaagaaaaaaagaaagaaagaaggaagaaggaaggaaagaaaggaaggaaggaaggaagaggaagggaaaggaagagagagagagaaagaaagaaagaaagaaagaaagaaagaagaaagaaagaaagaaagaaagaaagaagaaagaaagaagaaagaaagaaagaaagaaagaaagaaagaagaaagaaagaaagaaagaaagaaagaagaaaaaaagaagaaagaaagaaagaaagaaagaaagaaagaaagaaagaaagaagaaagaaagaaagaggaaacgaatgagagacaatggagccatgcacatggaagataagatgtgaggaactccatcaggcgctgaagagcctagtgccttctttccagtcatgaaatgcatggaggacagagcctgattttcacagggccacactaggggtgcagaggctgactcagctgagagcattgcctcatacaggctctggagccctacttccagttccaaagatttggagatgatgtcaaagatcatactgaatcactgtgggtagctgcttcctgaggaaaaaatgactaagcttattggtgagaccatgccattgatagagctatagaatgatcactctgaagcaatggagcctcaattatacttcaacacattcattatcagttaaatttttattaacatacccaatacaggaaaaaaagtagggaaacagttatagagagaaacgagaaaacaaaacaagttttatatccttttgtgcctcatgtatccctttgtactctttctctaaatgagttttatttcaaatgtgctctcttactttctaattccaagattatgtttgctagctaatctatttaagaataattagggaacaaaggcagaaaacattttctatttaattagatcttttctgtactgaagtttctggaataaaagtaaaatcaacacagaaactgaagacttctcctgatacaggtagtgtttcaattctttctcattatacatgtatacatacatatgtatgtatatatatatatacatatatatatcattatattatatactacatatataataacaaactatttcttgtgtatgtgcatgcttgtgtgtatgtatgtatgtatgtatatatgtatgtatgtatgtatgtataaagaaaaatgaaatatgtatagaagcataaagttctaccagtagttttattcatattttttaatctctatttatctcagttatgtctactttttcagaattcatatttggccctagccataaacctaaccctaactctagcttagtcatagctctagctttagccatatgattaccccttatataccactgacctaattatgattctatgatatttcataataatataaaagttgtaactatcacctcatatataaccttagatacaaccatttccctagctctatcctaaccctagcctagccttagttcttcctagccctaaccctaataataaccctaaccctagatctagccctagccctagccctatcgctagcaatagctgtagccctaactggatctctggttataaccatagctagctttgcttcttctgggttatgaactctgcttaacaacactaaggaagcatatttcagagtttaatttttctctgggtctatgttactttttgaaacttagcaagtcaaattatggtaatattcccaccatccataaagaaatgcaaatattgctgggcatagtggtgtacatctttaatcccagcacttgggaggcagaagcaggtggatttctgagttcaaggccagcctggtctacaaagtgagttccaggacaactagggctatacagagaaaccctgtctcgaaaaaccaaaaaaaaaaaaaaaaaaaaaaaaaaaaaatagaaaaaaaaaaagaaaaaaaagaaagaaatgcaaacattgatcaatgctatctcatctctgtaccatctacatcctgtataggatcttcataatgcaataaatgtatcattaactccatgattactaaaaatttcccaatataatgtactaattaagatcactgactttttaaggaaaaaagttttgtttttcagttatggagattcctctgcatgatcagatgggtttctcatttcagagctctggtaagaatactgtatgagaatagtcaggggcaaataaaacacgataaactactctccttgtgatctggaagccaagaaagaatgaaacgactgatgtcccttaatctccttcaaggtcacaccctcaatcctctagggacagccatttagttattgtcacttagttcagccatctcccagtagtgttacccttgggatcatgtctttgacacatgtgttcttggggaggacttatccaatctatatagcatcacttagactcagtacgatgaataaatacttttcccccagactacagatcagaaagcattagagctgaggtttatcaatgtcaatgtcgtggcctatatttaaagattttgcttttgctcttccaggattttcattgtccaagacattggttttgtatcccaaacaggaaagcaccaatccagcaactcactgcacaggaatagagcataggtgtatggacttggtttgccttatgatattaggaatttgctagcttaaaaatgaggattcttggccctggtgatcccctgtactgcggtatataaacttttcaagaccaatgggcctctctttacaatgatggctgactaggccatcttctgatacatatgggggggggcggtatggggacttttgggatagcattggaaatggaaatgaagaaaatacctaattaaaaaaatgaaaaaaaatgaggattcttcatgtgtttattaaaatgaaaaatggttttaaaactgtgagtagcaagcacaaagcccttgaacatacttttcctgtaacgaggaagttctttctctttggtccaaatgctttcattagcaagcaaatccattccttggttgttctgtggtaaagagcccaggctctggagctatcaacagaagttgatggtcccactgggattcttcataccactttctataaagaagaaattatattaatagtgccagtctcataagcttgtgagaagcaaatgagtcaatagatttgttgagccattagaatgttaccttgttctaataaacactcataaagtattaaccatttcaattattagaaatacaaggagcatgtcgtttggctggcatgctgaattagcttttttggcagctagaaatctaaaggatatgtaattataaggttgtaataattcgtttttttaaataatccacatgaaaattagacgatatatctctaatatttggcatttgaagccatctcaaatgtttaatttttttaaaactctaattgattaagttattttttttaagtaactgtttggaatactttaagggatgagtaaaatttctttcaattacctgcaaggtggtgcattactctctcaataatttgtatcatactatatgatcttggagcttaaatttaaaatgacttattctttaaccaaagtgtcctcctatgatccatattatcttcttttctatagaatacagaattttttttcctacataaactcaggcacaactaagggagatagcaatacttattgaggttaaaatatttgcttcatggtcatgccgattcatttcttttaaattcttaaactgtcctcagcttaaagaggtcttgatttagtctataggaatggaaggttgaaacaagaatgtgaatattgccaaatactgccaaggtgcgcaccagtctggtacaatttttatgaatagaagttcaaatttcaggccacccttgcaaattctgttgtggatttttgtggttgggaggcaggcccttgaattcctctgcatctcagttttgtcatctatctaagtgtaagagtttgggctcaacccctgagcacaggtaggtatcatgcatagcatcagttactttgtccagtgcaccaaaataattttgaatggaagtatcttaaaggttcattttagctcatggtgtagggagctaaaattcgctctgcagcaccattgcaagaccccagtgttctctgctctatttcgatgcattaggaagcagaaagtgctcacacagatcactaacttgactagagcccttaagacctgacctacagagaatcaattcctccagcttttcccttttgaagtttccataacctccctaaacagggccacttgctgaggaccatgcattccaacaagtgaacctgtgggagatgcttcacttttcaaagtgtagttttatggaatcgccgcaagcagctccctgtaaggggcaaaagcaatcagcatgacttcctttcccctttctcaccaggtacaatccttttggactatttccacctaaacttccctggcttctgttattttaccatgcccttttaaggccaggtttcctagcctcccttctggccttccctgctccttggtcctggagaattcagagattcttcttccttctgaaatcctgtgctatgttgtaatactgtcgttgctctagtgtttcagacttgagacatggatgttttacatgctggtggctgatctgtcgtatttattagcacagtaacaatcccttcataccgttacatgcatctccttctgtattctggggttacccgaggtatggcagtctgcttaaattaataaagggatatggtaacacacaggagatatatccacaaagactgcaaaggcaccaccagggtaggaaaaaccatacaatatcccagcaggtggatgctttcagattaaataatcactttacagccctgctggagattagttatccatcatcacaatgtggaccatgatgccggagcttcgctctaggaggaggattgaatgcagaatgcagtgggagtgctgcactaaaggagttatttcttccattctatggaatgtattttagcctagcagataaattctatcattagacatttttatgcactgtctggctaggtactggctccaagatcttttatgaacccctaccccctatttacaaaatataggagaacaacaagttcttgtagagtaacagaagacctggggaatagtaggaaataaagaaatctcttcctacagagacatctgtattcaaaaactgaaaggggtgttttaccagttgttcacattgttaaagacgataatggcagtatgattagagaaacaattataaacatgcataaattatggatttaatgtattgtatttatgagtgataattttgaaaaaaaaagacccttaaactgtaataaacaaccagagttccaagggcagaaagaaaaatttaaatggcatagaaatgcaatttacaaaagtaagagacattttgccaagccaattagataactcaaaggtagaacgtgttataaaaactaataaaaatgggactgataatctctaacttgaaagtaaccaggttttgtactaaaatgtaaaatactaataacttgatgggaaacataaagcatgcaaaaggagaaaattactaatattcttcaattgtttcttttgtttgtggtagtgttatttatctttccatttcacaacgttgtatgtattgcttggattaaaactcaaaattgaacaagttggtaggtaatataagtcctgaaattaggtgtcatgccagaagttttaactcaaaaccataattatggtttaaaattaggtctacgtgatggatctggcttctagtttcaaatctgtctcaattgatgctaatgggagcagttccctgctcagttcaagagaacagcgctggggctcaggagttgttagactcttgaagagagtcagcctagatccctctgctggtatcaaaataaaggaagtagttaattaataataattataaaaaggatattacatgttacttcagaggaccaagcaatcatgaagatagttgtctcccatctagtcacaaatgatggatatgtaattatacctctgaacaactcagaagagggtttctagccttgtaaatctcccttgctcatttttgtgcaagaccacgtttctctcatgataaagatagagaacggaccatgaatctatgagctttaatctgttaattattgactaagagaaaggtttgtgggaaatggtaggtttcagctttaataaatagtggggttggttctgtccggtaacagatatgtgtaattcttgttaaattcacagccagttatacaactgaatcaaagcaaaatggtatctttgatagaatgttctgattttgtctaaaacagtagagacacatgttattgttctctgcggagatcacagaacacttttatgcaggatatagctacatgttttaatgtagagtatgcaacggggatcatatataaaatataatccccccaaaacataaataaaattgactttttacattttttttaaagctgctcccagctacttaactttatagattgtgaggatgtgtagatacttagaaatctatttgcttatttctgggttttcaaaatatcagatcttgacagttgtctttatcaaattatcataacaaccaataagatgaaaggaagttgagatatttaaaaggaaccctacttacaggtaggtagagctctgaatgctcacagtgttaaaaccccttgtcagggattgttaagctgtgtatggcctttgcttttctatcagggaattgaattgtttctattaatatgcctgtaaaataggggaaagctatctgcccactctgtctcactgtgatcctataattaacctaaatagaaaatatgtcgatgtactaaaaggggctacattaattagtaaaatccgtttagaagaagcatttcaatacttcatgtaaaaatctagattattggattctatatcctgattacaaatcagccaaggacactgaaggattactgatacatcaaagcctaaactcttttcctaaaccccatatatatttactgaaggtggtggtggcataaatttaggtgcaggtgaatgtaaacagttgtctccactctaacaaaatgtttctttcattgctttcatagtaaagggtttgaaacatttttttcataaaactatgggaaggatggaaggagctcaaggggtttgaaaacccacaggaagaacaacaatatcgaccaactagaacccctcggagctcccagaatctaaactatcaaccacagagtttacatggagggacccatggctccagctacatatatagcaaaggattgccttatctggcatcagtgggtgaagagccccttggtcctgtggaggctcaatgccccagtgtagggtaatgctagggtgcagaggcaggagtgggtgagtgggtagggagcaccttcacagaagcaggggaaggggaataggatagggtgattgaggaagagaaaccgggaaagggtccttcatagaacattgagagagaaagagacagacagacagacagacagacagacagacagacagagaggagacagagagaaactaggattatatttctttcttctgctcagttctcagttaccatcccttgaaccttcatgcccttccaatctcagtccaaaacctctttctctttgttattgttacaaaccacacacacacacacacacacacacacacacacacacacaaacacacatgcatacacatacacacacacatgtatgaataaatatataaatacaacttgcttatctatttcagtttccagtgtttatctacacagagtcaaccatgcatcatcttatctttgagaacaaagaggcaaaaaaaatgtttcagtgaaattgctggtgtatgtattttcagttgatttcttctaatgtaactgtgtttcctcagccctgtttctttcttaagactcaagtttggttagccaaattctttctaatgctccagtaccccttaattatcttatctctaatattttttttaaattcatgactagaaattgctcattaagtgcattaagtgggtttttttttttttttgcgaagcaaccttcagaaaaaacataatgaatcagaacttgagtggaaccagaaactagaagcaaaggcaatgtgtgctgcttgcttcttccctattagtgctcttgttctgcttctacaatattatttgatgtaagaatgcaagacgaggactggtgactgaatacggagtgcacagagaacttactacctttgctatgggacgatcctagatagaagggagaagggtatgcatgaaggtaaccccatttgatatctgctgcgtttctgtagaattcctcgtgaaagttggcattggcttggcattggctgctgtttaatctgcaagacccactgtgctgattcttaaatgctagaagagtgttactccatagacaccagtatttgaatatttaaatggaaagtttcaagctacaatgaaaccacctgctccatcttgctgtttctaggcgggaggcatctataaaattgttttattaaggcaggagtctagagatcaaagaagttcattgtcttctctgcatgcctcagattctaaaaaggatattcgctgtcaacttcacatcagagatgtggtccattttgaaagaaatattgcaagagagatttgaaacatttcctcagaaagacagctttatcttcttgtttcactgccaatctgtcattcttctttttgtctgttttagtgctatggatttggtttccatgattaaagttacccagaagacatattaatccctggatctttgttaactctaattttgtgtttatcaaatattaataggcacacgaattcccttaggaaagtattataagtctgaggtagatagattatgtgtttaaacaaacttgaaatgattcaggatcttcatccaggaaagattctataccttctgtaaaagcataggttttgatctctctctctctctctctctctctctctctctctctctctctctctctctctctcacttatttattttacactttaggttttattcccctcccagtccaccctccaactgctcccacatcccattcctcctccctgtcccctgtctccatgaggatgtccccaccacccactgcccacccaactggacctctaaatctctaaactcgctggggcctccagtctcttgagggttaggtgtaccttctctgactgaacccagacccggcagtcttcttctgcatatgtgttggtggcctcatatcagctggtgtgtgctgcctggatggtggtccagtttttgaaagatctctcaggtctaggttaattgagactgttggtcctcctacagggtcaccctcctcctcatcttcctccagttttccctagtttaaccactggggtcagcaggttctgtccattggctaggtgtaaatatctgcatctgactcagctgcttgttgggtctttcagagggcagtccccttttgtgagcgctccatagcctcagtaatagtgtcaggccttgggaccttccctagagctggagcccactttgggcttgttgaggaccttcttttcctcaggcacctctccatttccatccctgcagttctttcagacaggaacaattatgggtcagaattttaacactgggatgtcaaacccctccctcacttgatgtcttctgtcttcccactggaggtgggctctataagttccctctccctactcttaggcatttcatctaaggttcccccccaccactttttgaggcctgagagtctctcacctcccaggtctctggtacattctggagcccccccccccaccttctaccgcccaaggttgcctgtttctattctttctgctgaccctgggggtttcagtcctttccttcactcgataccagaccaggtttccttcttcctctctgcttcccctgcaaacttttcctcccaggtctctccctccctccccacttgtgattgctttcttctcactccaaagtgagactgaggcatcctcacttaggctcttcagcttattgacatttttgagctctgtggacagtatcttgggtgttctgtctttttttgtgtgtgtgataatattcacttgttagagagtatataccatgcatgtccttttgggtctgagttacttcactcaggatgatattttctagttccatacatttgcctgcaaaactcagggtgtcctcattcttaatagctaaatagtattccattgtgtaaatgaaccacattttctgtacccattcttctgtggagagacatctgggttgtttcaaacttctgcctataacaaataaggtcacaatgggaacacatgcccttgtggcatggtggggcatcttttgggtatattccatagagtggtatttctgggtcttcaggtaaatatatttccaatttctgagggacctccagattgatttccagaatggttatatcagtttgcaatcccaccagcaatggaggagtgttctttctctacatcctcaccaacacgtgttgtcatctgaggttttgatcttagccattctcattggtgtaagatagaatctcagggtcactttgatttgtacttctctgatcactaaggactttaaacatttctttaggtgcctctctgccatttgaaattactctgttgtgacttctcgatctagatctatactccatttttggattgggttgtttggggtttttggtggttagcttcttgagttctttatatattttggatattttttgttattattgttttcattgcttataggatataatactatttgcattgaaaaggctatattctgacctgggatcattttctctaattgttcttaacactgctgtattttcctgcatcatgaggcaatgcttcaatgctcaatgtaggggcccaagagggctctggaggcaaaaaagaagtatatgaagtgagacagaaataagtgttatgtgctgaaatctcaaaaacataagaagcaaaccttcctgctaagttagagagattgattctcagtagcctatggtataaagagacattagcagtggttggccttgaatctgctcattgctggcaggagatgtttatttttgtagctggtttgtccataacttataatttttgttaatggggcatttctatccaacacacacacacacacacacacacacacacacacacacacacacacatgaatttcactccctctaaggaaggcttggattcacctagctcttgtctgcacaggtatcacagaacatgaaaacctcccctcggggtggaattttttcctatgagtgtcaaggcttaataaatgaaagaattaacactgttgaaatcccctctatgaagatctcagttgtgacattctatgttgacatactgcttctacagccaaagggggcaaggacttgttcttttcttacacatatttattaagaacatggcaaacattttgacatggcattattttttataggttttctgtaaatacaattagagttgaattaagttgaaatgatggcagtccttctaccattttttgaagtttgcagtggtgctgttgggctctttaattgcctactaatgtaaaaacatcattgttagtaaggcataaatcatggcaattttgtcccactagaggctaaaagcagcccgagatgtggtaattaagatactctaatagacctgacagtttctataataggagcttttaacaaggtggaaaagagcaagtcatctctcatgcaacaggaaggcaacaacaacaacaaaaaataggaaattttcttcatatgaaagaagtcacctggtcaaaaaaaaaaaaaaaaaaaaaaacattagcgaagcagcaggtctgtgtctttctctgtgtgacaacttgggagtatgacttaagctccataaattgtaaagactctagctcagagcctgatgatttgcttttatgagtaagaaatcagaagcagagagaatatctgttcctgggggcttgagagcagagctgaaactagaaacagacacctctctttgagaaggatctgagcatccgtgcttattttattttattttttttccatgaaagacactcggaagttgtcaaactcttatacttttctatttttatttgattctccctttcctgtgctgctggacacgcgtttctgatatttgggttgtacacaggacattatttgacaatgggtacgaggagggattgtaaggatttaaagacttcacaccagctttaaggacagaaaaaaaaaaatcagcaggtccccgaatcaccttacttctaaagtgtgtgtgtgtgtttaaatgagttgtgagtctctgacacacgcaacaagtcagaggggatgacaggatccattttccccttgacacttatttaatccaattagaattaattaaaactgtctgtacgcatgaaggtcctgtgctacagatgccagcaacttcaggtctacttaatggctctgcccttacacggagcctttcattagatccctcggggtgttttcagaatattaatgttcatttttaatttaacgaacttttcctatatgaaatcaaacaaaaataataatcaggcctaaagaggtggttcagtggttaaaagcatttgtgactcctctaaaagacatggttttggttcgcagccctcacatcaggaatcttacatctgcctgtaactccaattattaggatctgacctcatcttcttgcctgcctgggcaccttcaaatacaagattcatatacatacacttaagcacacacacatgtatacacataacctatgtcttacattcttttttattcattgattcattgaattaaagtactagctgcctgtttctcaccatactccatgaggtattggatgaatgatccagattgggggcagggggtcttagattccatgataaaagcaatagtatattgaagcaacatcaggaatgagacatgcgaataagtattcatataaattgaaaattttgttatgtccacaaaaaaatgttggtatgaccatgaatggaaatctgagaaagaataggcttaagtattttgtagtgttgaccagtgttaagaagtaagaaataagacagtattgcagaaaacatcatgggcaggagccagaccagggaaaagtcagcctgatttgaaaaatggagcatagacagtggagttggaacccacaactagacatagagaaaagagcaggagccagaccgtgagaggccaggcagcttttggatccttgtgtatatagatgtctactagaagtagaatttagtaaaaagaagagttttaagcaaaataattgtggagatcatgtaaacttaaaatcctttgttcttgaaggtgtgtgaatatctgcatatgatcaaacggcagagcgttgcctgtatttgctcctgtgccagtttcctgagtttgagctagaactgttacttaagggtagtcattctaaacaatgtgttgagaaacacaggacagcctcctgtatgttttccctcacctttacatatgcaagaatttttaaaagtgcttagaaactagatgtgtttagatatacagaaagcacaaattgttgtagcttaaactgattcagaagtcagatatgaagttattctggtgtgctggtgacagatagtcatgactatagagacaggggagtggccaagctgatgtatattttgtgggtagaatgaacaggaattgatgaaatattagatatgtagaattcaagaaaaaggatcctgaagagagatcaaagatttacttgaacaacacaacagtgttgatgtatagaagctatgaaggttagggttccacagctaggtaatcatctttgtctggtatatggaagagtgaaactagcataaacttgaggatgcagagatatgttaggcacaaaacaaatatggctaaggttatacccggggacaagaagtaatgaaaataaaggaaagagcaaagatctctgatgtacagtgaaaaccagctaagaacaatggcattagccaaatataggaaacaattctaccatgaaagtggtaagtttttaagaaaaattctgaaatgttgagcagaattttaataatctttaaatttagcaatgcagggccataaagatggctcagctggtaaaggtgcttgcagtcaagcctgaaaaatagagttttatctcctgaacacagatggtacaaggaaacttgtactctgaaactgtcctctgaccagcacacatgtaacataggacacacacacacacacacacatatacacacaaacatacacacacacacacacactcacacacacacacaccaaatagagaaatgtatcatttttttacattatcaatacaatactttgattaagttgatgacagtacctcagactagtgagagtatggatgtgtttgggaaaagactaagtagataattcttaagaagggaaatgtagccatggctagaaatagttgtaaaccataatcgttgctttagaaggaagatgacttgatatatcaatgctatcagtgaataagagagtcaaaaggtcaaagacacaagagaaaagaggaaaatgactaaaggttcgcagtccttgatagaaaagcaatggctttatagatgagagggactggaggaattcaccttagagaaaaacaagaatagattatctggtgaagcaaaaaaagaagagatttatctttgcaaagaggtttaagaattgttagaagaagatagaatgatcccttttaggatttctccttttctattactgaagtgaaataaactataaaagtaaaggagagttggatatagggaaatttcaatggggaaaaaaaaagaccattctatcaaaagggactgagaaaaagattgcctcaggaagaaagtagtgacatcaggaagtatatgttattttctctctcaaaaaaaaaaaaattgatactctggtgagacacgtgatggagggcacagcactggaatccagcctctgccacagaggtctgtacaactgtggaggaagtactgggaagggcagtggacaacacttgccaagtcatgactatgatgtctagtccaaactatgacaattatcaaggttcagccaagatcacaaaacaaacaaacaaacaaagctctgtaaaaggctcaggacataacttatttaatgttccgatgatgataattatagagctggaagaaggagaccaagggaaaggagagaagcagatacagagaaggacatagcctcagaagacaatcaaaatcacacgagatggctaaggaaatttgaattctgtttttggaaaaatagatacccctataaatatttaagccttctatgctgtgatagcgaattttcctattcactgtaaccctttaattttgttgtggattagttccccttgcaaaattcatcttcatagaagttcttgtgattgtgggacagtgattcctgagtggtttttcttgctagacttgttagaatgatagtgtctctatcatagtacagtagaactccaaaggatatttttttataattcatttgtaaatagagctcaaaacatacgtgaaaataattagagaaatgtttgatgacaggttctctttttttcagatctgaattataaatggctagtatacaggtaacttacctactatgaaagaaggagagaaaaaaagtgaatggctaaatcttatgacattgataatgctgctaggaactgaggctgaagtcctgaggagcaaaggattgtgttgatgacataaacagattgcttggcagtggtggcacatgcctttaatcccagcacttgggaggcacaggtaggcagatttctgagtttgagctatagaccagcctggtctatagagtgagttctaggacagccagggcttcacagagaaaccctgtctcaaaaaacaacaacaacaaaaacaaaacaaaagacaaaaaatatggtataagcagagaaatgtatttatccatctttccttcttagacagagaagggcaagacagtagttagtccacacttgttaggtgtgatactttatatactagcctgtgaacctgatgactggtgtcttaatgtgtctccacatgtggatgcagagcatacttcctttattgcttatgtggctcagcagacagacatgccttctactcaggtagtactcaaagaaatagacaaaggcaaaaagaaagccatgtttgagttaaccgctgccttaagtttggtcttttcaaacatcagttcccagatttaaaaaaaaaaaaaaaacatgcacaaccaaacaagataaatagcaatactgatgcatgtgtatatatatctaccatgaacgtatcacagtgaaactgttgctaggtaaaagcaagaaaagcatctaaaataagaggaaatacagtttgctcaaagagctaggaacaataatttatagccaattcaataaaatatggaaatggaagactgtatcttccaaactagatttctaaactcatcaaaaatactcttcatgagggatattttggagatatatgcatgccagatatccttagaacacgtaggtttctctagttttgttcctcatgtctgacacttgttttgtttgaaatatcttatcagttgaaacttaattagtattttgtttggtcttatctctagcataccatattttctctggtgtgattttcagtgatttcaaagatcttctgtcattactttcatgatgattaaaataacttaaacctattaaaatgacttcattagatcttcaaattcaccttctactaatacacacacacacacacacacacacacacacacacacacttattttgttgtttttggtgatgtgtgtgtgaattatctagggttgtttgtttgtttgtttgttgtgaattgcatatgtgatgccagcatttgcttttggttcattataatcttactaagcttgtaagtcagtcagtagtggtagaatcttaaaacactgttcactgtttgttttttttttttttttttcaaaagcacagccactctaaatttatctgaaagcctacaggacaatgacttccatttctatgtctcttctttccatctggcaattttctttttttttcctcttctcttctttctctggtttaaagtaactgtttatagaatttcaattccacagttagaactcacttcgatacagctttaaaactgccttggaatatgtatgttgtttcattgtaatttctactttaatatcttttaatgaatgtattctttgacactttcacacaagtcagtaatgtattattgctgctgttccccatccaccttttgaattaattgtttttgaaggatgcttttcctgaaagccttcattcctcctttgagataaatgtggagtttcttggtgttgtgtgtatatatatatacacacacacacatacacacacacacacacacatttgtggctttaccatacagtatacagatgatacctttgcaagattttcacacatgtgtttatctcactgagacttcactgaggcaatttcaactccttagccatatgtgtccaaacactgattttcttcacatgctcacctatgcagtagatcaatttcctctgccataggcatatacacagtgcccctccatcttttatgtgatttccaataattccacgttttctagtgatattttcggctccactgaccctgttttctatggtgtctaacaggacaagtcttgatcatatcctttgtatcagttgtataacttgagcattgtagagtacttttataactcaccatttctcaatgaaatcgattcgttgcatgtgttttcttccattctctatgtatttttcttaaaaaaaaaataactataggtatgcttattattacctttcctgttaattaaaatctccagcccatttcacagggattttaataacattttcagactgtcctgttttgccatgtctagtttttcttctgattactaaacacaatctataaaatattcaggtttactgatcctaggaacgcctccagcccccactgaatggcttgctaagaggaaatggtgtcagcctgggttatagatactcttctttgcccttgaactgaacatgtgcatacagggttgctggctggtttgggttcttccctctgtgggcctctctctatagtttgtgtctctcccagtgtagggccttccttaaaggctatgcagtctcaggatccgttcatagtcttctgtagctttggatctttcgttctcttaattcgtcagctttagtttgttcttcttaggaaaaaacagacacctctctttggttttttgatgttgttacaaatagtgataataataataatgtaatcaattttattggtttctgtaccaacaaaacagactgctgctgcctaggtaaatcatagttgatgtattttcaaatggacccaatgtatgtaacatcagctcatcttcacaaatgtttattttctctcagtcttggtgcttaacgcttcagcagcaacttagatctcagaaaactgtaacccaagatgaagagctgcagacaaattagtagctgctgagagaggaagaataaggtttctccagggaagactctctgataggttacacaatctgaaacagttccaataaacacacaagcttatgggcaacaacaaaggacttagaaagctaggctggacttccataaagattaaaggctatgtgtcatttgtactgtaacatatgttatttatttgtaacagtaattaatgaggagtaggtcaggtatttgaaggacagtggagagaaagagaggtaaaatattttaagtacagttaaaaattttgaaactatccttgttgccctttgaatttgccaatcaagctcattttagctaatttgggggtggatcatattgaataataaaacaagtcatgtcttacaatcaactatttcctgctttctttcttaaacaaacaacaaaataaccagtcttattatatgaaaaacaaatttcaaaacaatatcttttacataataaacaacattagataattttactcaattttaaattgagtaggtttagaaagatttaagagttctggcaatgtagcctgttgcaatacattattctggggacacaatgattagaagtcacaattagtgaagttagtgttaacactgcctgcactgtaacattggacaaatactagatttttttacatttcagcattgcaatctataaaatgaagaaatgtaagctttacatgctattatgggtgaaaaaatgaaaatacacttgtctgtactaaattctgtttacataatgtctcacatttgtctgctagacaacatagctcatattggaaattctgagaggaatggtggattcatgagtctaccactcacagagattccaactccttcttttattttgactctacttaaggtatgattccgggactcatccttacccatttaactccaaaatataattagcatgaagacaaaggtaattattgagtcaaagttatgctatccatgtgtttttttgcctcactcagttctcagaagtgtgaaaatcaacaaaagcctcaaaagtaaaaccttatcattcataactatgatccctgagagcctatagaaacatgcagtccattttcccaaatattttcaaaaccgtgtcagtagttttatacatgggttgaaagattactataaactaaacagaaagaaagaaaagggttttttttttaaaaggaaaagaatcagaaaatgtatttctgctaagtctttaaaaagccagcctttatacatttatgctaaagcaacatattgggtttctgcctgatgaatctaaccccaggtggttgcacatttgtagttcacgggttgagggcctgtagctgtgggtctcaggagctcctcgggtggtatttgcactctgtcgctggccctgttgatctgatttcatgacatctgttactgaggcagaggaggaagacatggacgtgcagcctctgtgaatctggtctgcatgccaatgagcctggctgctgttatctcgccatttattctgtggcctttggggctttgacaggcaatacccaatctggttttcatcatttgaagtcttagtatttactttaagatgttttactttgaaatcttaaaaaaaaagaatcaaataaataagcaagaagattgtgttctgtcatttcatatcgaacttgccttttacatagtcagagatttgagtataaaataaaaggagagaagggtctactttacgtatgatgaggaaaaaagggagcaggagagagagagggggggggagagagagagagagagagagaagagagagagcaaagaaaaacaaaatctgcaaaaccaaacaacaaacagccaaagctgaatcatcccttgtataatctatggaatctaccagtgttcagtgttagtttgtttgccttcttggggcggattggaatacttagcatccaagctgggattccctttctggttcacttttagccattctataatgaattgaaatttttttttttttaaatttcaggatgaagcccaagaaaattgctcatcccagagggtgttgattatctaatcaccaagattcttaaaaatgctgtttctctacatgaaaatgtgggctcacatgaaatggatcttgaacctcttaatcaagtggttttatatagacagtagcagaattgtcacattgttgagcatataagaaatgcagaatcgcaggccaccctctagctcacacacaggcaagtggaacctgcattttaatgagctccttggctcataacacatgcacaataaagccagagacacttcctggtgtagactaggggttgacaaattttcttccaaagaaacagagagtaaatattttgagttttacaggcaatatagtctgtgcttaagttactcagctttgacattgttccgaaaggcttctcagacaacagccaaaggattgtgtggctgccatttaatgcaaagtcatttgtggatactgaaactttttcatgtatcttgtgacatatcacaaaatgttctgctatttatgattatgtaaaatatgactcttctcatagactgtaggcagtagactgtgctggaacaggtcggttttcatgcacttgttattggaaatatgatttttcctttgcccttttaacataccacctggcatccatggctaccatagcccaatcagatactataacagaacatcacaaatgattgtgtaatcaagacatgtttaacctgggcctggtgaaatagacctgagatcccagctactagggaagcagaagcaggaagactgacaagttcaggccttcctagggtgaaaaattgagttcaaggccagcctgagcaaacaggaaactatgtcttaaaataaaaagtaaaagtaagactggaaatatagttcagtgttaatgtaactgcctagtatgcgcaaagtcttagattccactgtccatcactgttgaagcagacataaatgaccctattcttacattgatgtgttggttgaggggtcccagattcagcttccactgtgtaggatgataactttgggtctttatccctggcctgttgagagtagcctgcttgttggatcccactgtgagagagaataacctctgatgtttctttcattcacagcggagtgactagattagggagttgatctggctgcctcagataacatgaatcatttacataaagagcctacctccaaagactccaacattgtgctttagggctttaccatctggaattgagatgaaggagttaacctttacgtccacagtagagtataggatagccttttctccttccttgcctggcttgcatctccataatgtctccccaatttgcaatgtctgttacttacacatagtgttacaaattcatggtgggcatgtcctgtttcttgaactaaattttacttcacagctgatgacaatggtgaccaaagatggaagcctagtaacagctggaaattccgggttgacctcagcagttaacagtgggcaacttcaagagcagagcacacagttgtcagctcttgactctcttgactcttttatttactcatttttattaatttcatggttctccagaattctttttgtctttttttcctcatatttaaatttggagatgtggatggaagagtcacctatctatctcatctacggagagattaaaaaatgtttcataaatgcctctttattagccaatgatttgaggtagctggatgctagaagtgatttagaccccactgcggacactccccttacttttccaatgtttcagcacaggaaggaaattagttattgtacgccgtatctttccataatgtgcctctttgtcccctttccttcggtgttgctacaaaatgcttacctggcaaccatcataaaaaacagtccttgtttaacaaagggtgctccttgctgcgtgtttgccattgatgttttacatcggcaatgatcagtcttaaatatcaggctaccatgaacaattctcttgggagctattctatatttcttttcctgttgtatatttcctagtgttttgctcagtcctgttttaaatgacttcattcagagcttcccttgacttgcttcaggaatgtttgcattagtgactcaaggtacaagcagatgggggctccctaaggacatcatcaatcattctcaaggcttatctgtgccacaatcacaatttaaaactgaagagggaatgcatgtcttaggaagaaacttacatattacctgtctgctttattggctttgtgtaaacattgatgtcatcaccgtcttttcttttttctactctgattctacaaatcaacatttagctgggaccagagtctgactttttttaatgaatttaggcatgtagaccattcattaaatactattcttaccagatttgctgctcataacaaggagaatgtaattgacaaggcaagagcactcttgatgtagtgtaaatgttcaccaggaggtgagggactcctcctgctggaggagggctcttgttaatgacaagcaactagcatcaactcagcagtgcaagaaagcatgtggaagattcctgaatggcaaatgaagactgaatagaaaattttgaacagagctatttatcagcatcccgagtgtccacttagggaagcattcaattcttgatagttcattcattctggatttatcatgtagggaagcaggcattattgtaatgtttaattagactatgtgaaaaaagaagtagttagaagattgttaagtttattatccaggaaaagcaacataacttaactttgttgtgtatatatgatggttaaacacacacacacacacacacacacacacacacacacacacagacagacatagatctttgtcttagatatgtcttctttgtcattctgtggtaacactttggttgaacatagttttttaaattaaaactacattgcattgtttaaaattggtgcatctcacataatatttcttttgagtgaaatgtaatatatgcatatgtgtttgtttgtgtgggtaccacatgtatcctgggatgcttgaattacttatagaatactctgagttacaggtgattgaaaactgtcttatattggttcttggtatcaaactaatgaaccctggacgaagatgaagttcatagccactgagtgatctttccagcttgaataaaatttctttcatgctacaagtctgaaatttcagaatatttataacgtctccttctggatatgaatttatgtttgatttcttttaatcccttctccaggaaaaaaaaaggataaatgtatttctgagttgcatgctatgggagcttggtcatgtgacttacactttctggttctcagttttctcagttgtaaaatgggatgaaacctttactttctcatggatctgatgctttgtgttacatatttaagacaccgaacaaaataattggcaagtacgagtaatagatggtcaatagattgtgatggtttccgtagttatttggggtgttaaagtatcagtgatacctactgattttaagactgtcatagattatttgccaaaaataactgtagaatcagagtgattatcttgtagtgagaccatctgtattgaaatcttggccatgttggaaaatttgtattagactttattcatctttcacccaatacatacctttgcacattggtccaaactaagcagcaactgtactcatattcctaacgattatcagctacttgttttgaacatgaagcaaatacctgtggtgggagttactattgtgtattgtgcaacaaatggcatgccagagtcaatttggtactgctctccaaatataatagctatttttaccagtttgtaacatgatcctttgtgcagatcttatgcgtgtgcatcgcactgaccgagtgtaattgaagccttcacgggcttcactttttcagcagttcatcccacagaagaccataaagtcatagaaagagccagagacggagatagaaaattatgtagatagagttagagaagtagagatctataaataggtaaatggcggatagatatgttgataataaatagatgattgatagatagatgatagatagatacgggatgaatagatgagagtgtatctagaagaatcatcttgcaaagggacaatatgtggaatttaaattcacagaagttcataagtgtttggtagctgctgggaacttttaactatcaagaaaactgagcaatggaaaagaaacaatattttggaggatacttccagaatgtaaacctcagtccttaagttcatgtctgctatctttaaatcaattgatttatttctgtctaatatgctaatatcagagttataaactttgcaaatcttaagtctgcatgctactgtttctttctgagaaaacactacaatacagataaggtgtatttatctacagtgcatctagtgtgttgtatatccattttattagattctcaaatggaacatttagtgcagcaattaattacacttaattgctgttatcccaaaactttagtatttataaataaagataatgctatgaaaattgtcttaacatcaattgattcctgtgacaaaggttaaaaatcagacattctaaatatcagtaactatgaattatttagctgtaacacaatattttaatatgcttagaatatgtagcacctccagttagattttttttaatttgatactgtataaaacttaattattcaacctttctagcagatgatacagttttaagcattttggcctttgacaagttataactaaagaaattataactttaaagtgtaatagtgtaaaaagagaaggatcaagtcactttcttgaaatcaagaatatcaagtggctagagagatgactcagtagtcatgtgtacttgcagctcttctaggggacctaagtttagttctcagcactcatgttagcctgtgtacagaatataagctccagttacagaatataaaatggttccgggctccatgagcatctgtatacatgtggcacaaacgtagtcatgattgtacatcccaaagataaatgtgagtcctaaaaaagactatttaatatatctgaagacaaggagttaaatatcagaatatcttgacttttttatattttcagtaagggtcatgcatgctaatagcctttcccatggatggatgcaaagtaaaaagtccccatgttatacttactatttgattcttttcatataagatgattttcaaaataggaagtgggggatcatctaggattctgtgtaagtttacctttaagattttcttattataatacagacaatgataaatatagcagggcactgcacttgtagaattgatccttccatccactgaacaggaatgaagaactattacatcatgccttagaaatggccaggttgcaaatagccaattcattgttgcttctaatttggaagctgacaaatacttgctttattgccctgtcacatgcaaagtctatcattctgcttacacagcacaaggcagtaacctacataattcttccaggatattctaaaagccctgaggcaagagttcatactgtatgtatttggcattcagaatcagatatggaaatgccttcagtgatatcctgggaaattttccaaatattcaaaaaacaatttttacagctcatcatctttgcatgcattagtttgcatgaccttgctaatgtttgccttggtcatatatttattgcacatttgacatttggcatctggatttatcaaactgaaatctattgtgttcaagttgctttacgtcccagagatgacagaacaattacagaaaggagaagagtcaaattaaactgaagagaacttgttaatctccaatgtttctttctttccaagatataaactaccatattgagagaatggggtaatttactatgacagaagtacacccaaataaaatcccaactggtagtgtgctcctgtaattgcttaactgtggaagccaagataggagggactgatgggcttgcttgtcagccagtgtagctgaatctctgagctgtgggatcagtgacagaacctgtcttcaaaacacaaggtgaaaagtaattgatcaagataatgcactctgccgtcaagtaccatgcaggtaccctctcacctacacacacacacacacacacacacacacacacacacacacacactaaaagcatatatatagagagaagtgacaccttaaactcaatgttctgtttttaaggtgagccttaattattatagtaaaattttgaaaaaataaattagaggttaataatcataataaccgatgctagttgtataaagccatactctcaaaagtgaaagttccactctttactacgctgtccgtattctaggcaaatgagaactcagagtcacccttcccaaaagatgtgctacactgataatctaaaagtgtatggtagaaccaaagctaagcaaagcactgtctttgttgcttcactaaaccactctctactgagaacagtacctgaagtaatgtatttacttccttacaaatatatagtaagtaaagtgcatggcatgttcagaactcatgtctttcttttagcttctttcatagcctcctgcaagttgtaagaattctgtaagacagaattttattcctgtctccatctgctgaaatgatactgggtctgtctgcacttggcttttgtcccaattccatgctgacatcttctgaaaggaacatatgccctctgaacctgactggatcaatcatgtatctattaatttctgagcctatgttgattcaactactctggtgtcagatttataactcatggttactagatatgatgcatgatggcttcttgttcaggtattctgtgtactcacacaagttgattagatatatctgcctgcacattctcggaatgtgcctggaagtggaactggggtgtggtctctcactgcctacagtattgcacaagtgcttcgggaacaacgtaaaatgaagaagttatagctactaccttgttctcccctccatcaactgtctctcctttatcaaatccaataagatagcaacttaatttttgattgttcacatggtatgaagaagttcttgcatcttgcagtctgtatgagtgaaggacaggcatgtccccagtgactatcttctacccaccaaaactctgaattcctggatggaggcagaggaagccccactatgctttagtgcttctcctactcatagttcatgaatggctgctcatagtagacactcttgtaaaatagatgcgtaaaatagaaggaaaacaaaaagaccctggctagaattcttcagtgtggtaatgacttggttagaatactgattccacaagcctaatgatgactgcatttgttagtccaaagtctaagggtagtgacgtgaaatatagctattgctgcaatatcttaaaaaaaaaacatttattttaaacttgttatccactttctaaagattttactgttcctggttctccatctttaccctctgtggtctaaatgaggagtctctcaccaacctcaatctgtttctctagccctctctacctacattttattattttattaattttattttttgtctgaagtagcccattagagacttttgaagacactattgataatgtctatttgacctgtcatgaacaacttccaaatattgactgagcatttgctttattttagtgcaagtttctaagaaattcaaaaatgatctagtaatgttgtttacaatacatttctaaccttgttctaaaaaaagattcaactgcacaactttgagagtttcaactgtgcatctatttgtagagaaaaggagggaacatttgagaaaacacatcaagcaaatacagtttgctgaagtggccaaaatgggtgatcttttacttgaaatgtggggtttctgtagagttgcattcgattgacatgttaccgtattgccaggcttggcaaatgatacctgtgtataattgggtttcttgaaaatcccctgagataaagatttttgttctttccaaagtcttaaactagagaagaaacaaacctgaagagatgttacaattgtccagttccaacagctacagaaaaccaagaatttaatataggctttctacctttgacttttattcttcaacacattcattgcttgtttttacaagaaaatgtacacacacacaaacacacacacacacacaacctcaaaggccatgaaaagaaatatacaagaatattagaaaaagttagagcatttagtaaatttctattttctatgaggatgaaacaattatccatcatcacaattaagaagtgctggtacagtttggcctctactttagtctaatccctcaaagaattgagttcaagtcaagaaacttaagaagcacagagagtattttgctttctatcccgtggatgcattatttgaagtaacatggatttgcttttgaaaataaaattgcaatactaatgaaatggaaattggaagggtgaccattcctcttgggcaaactcgatgttgccaaaatgtcatagtcttttttttttttaatcacagaaattctgaaacagctgtgatattctaaatatatttgttaattcgtatcagctgtgttaaaaaggtcatttgtaaaaatctgctaattttattgaaatacttcttttgggggtgaggaaacacatttgcacatgtcaccatgttcacagagctgcctgccagggtgaaagaaagtgtgaatttcccaatgggatcccagtattatcattctaaagtctctgcaatatcaaattccccaaagaaaagcagtagggtaatattgtttttctcctttgttttgcaggtacatttttattttcgataatttcaatactgtagatgaactattttgcataatctccccttttaggactaattgaaaaggctaaagtttttaaatattccagtacaatgaataaccttcttaatgtcgattacataatgctaaaccagaaaaaaaattaaagattttacttcaaacataaaatctataatctctagcatttctttataaatgatctaacattaactggttaaacacaattcttcatataacatggttcatcttataatagaatttggtaatgtagtaaagtattaagtaaaagttagacatatgctatttaaattcagtttagtacaaatggatagcttgtattaggagcattgtctttatattaaattttgattgcatgttctcagaatgaataaagctgtatctattgtctcattttaaaaaaatctatttaagggagcattcttttgctatttcagtgcttcaatattagtctctattgtacttcatgatttttttcttcttaaaaataaacatttcagttttaaaattccttctgcatttctctcctttcttctcccttccctccattcccttcccctcctctctttttctctcctctctttttccttctcctccttccaggtgtctgctctttaaataaaaatacagatccaccattactattaatgaaaccataattactggatattgctattttattacctgtactttcaatgctagctgtagatctaattatttctccatttcagttaaacttttgaacaatggttattaacaataaagcatatgaggaatttaaagtgacagttgttataggtatttcactgatattgtagataatcgcatttaaagttcaaattgatgatggatcacattgattaaaaagttgggactggatataaaaggaactcccaaaggatagcttttggaatgagtccaaagataatatattgtatcatgcaaaatgggcacaaatagttaaaaagactaatataccatgggtgtttgttgacttgagataagatgctaattctctagcacttaatgggaatcttacatcctttcctgggctttctattctctgctgggcttcagtatttgtttccccatcattattgttattaaaccaagccaatcaggttgaactaattaatttctgtcaaatgaatcaaagtctagtgaacagaactaagatgttatttttctaatcatttcaattttctcagagtcaaatacattaacatggtgcttgtggtatattaatataggatgggttgcactgaagttttgtgtataaaaaaaccatttgcatgatttaaatttacatttgcatttttaaatggaaatcgtataaaagataagagattgaataatataatggctgaagttaattcagagattgtcttgtaaaaaaatccaaggtgacagcagttttcctttgtgagttcaacacttaaccaatcagttgccaaattgtgaattatccaggaacaatgggaaaatattctattcctctttgttcccagaatcaaagtgaaactcaaaaatgtgcatatattttctgatcgtatgttcccagatagatctttactattagcctcctaagtaaactaaaacttacactgtgtgcctgtgagatggctcacaaggtaaaagtacttgccccatgacccgggcaagctgagatctatccctagacagaaagatgagaatcatctgcataaagttgtcctctgacctccacatgctcactggggctcatggtccctcaacacaatgcagaacagtgactataataacaaaagcaataacaactataataaatcataaaggctactctggtagcctgagagaggaagcagtggtgggaacatctttcagcaaaacagctttctttttttcttccattcctactattagaaaataaaataaccgtttcaacctagtgaatggaagccaccttttaaaaatattttcattatgctgataaatcgtaaaaatcattttctacctaattctttaaatactgataacttgtactaaatttaagtatgtcttcattttagcttagttttaaagggaaagtagggaatcatttttgtcaatttcatgattaatactgacatacttatttctcctgaaaagaaaccaggcttggtaggagagacctgtaaccctgcctccttcagaggctgaacaggtagccatgtgttcaagactcaactgtgccacagaatgacttcaaggtggacatactaagcaactcaatgagatctgacggccaaggaaaaagacaacagtagaccaggaagagagatcaacagcaatatgctcacacagcatgcagaaagccataggttcggtgcccggctcaaagaggaacaaaatgatttagaatttctgcctgttagaagaaaaagtaatggtaaatctctatctttacagtttgaaattttttaattacaaggcaatcatatatcaaataaatattgaaccatacctacaattttattttcaaatttgaataatgaaactaattaaagatgtgagaaaacctggagaggttccaaaggacaaaaactcagttgaatggggatgtaatgtgactccagatggaaactgattttaagagtgtggatttctatccaggaaagatttagaacttgataggattcaaaatttcaaaatcattccaagaagaaaaagaaaaaagaaaaatatctgagcccaccatacttgatgcactttttattattctttgaaagatatttttcaagcacaagcaatagtatttgacacagcaaataatatattgccagatgtgttacttctccataggtactatcccagtgtacttattccaatacgcatggaatattgaatacctgggcggtgcttgcgtgactgaggaactaatattgaatctgaattaagatgggaggtcactgtaaagcatacaataatatgaaaaaaaaactcattagtaatgatatatgagcatcacagactagcagaaaagttttaatgattgattcatgttaaactgataatattttgcatatagagaattaaatcaaattagaaaaaaaatatttcatttgcctctttttattttattttattttattttactgtggcaactttactactttaaagttactactttattttatattactttttatttctattgagataagtatgcattccagtaaggtgttaaaagagtgtgattgactatgaattctgtattagactgcactttcttcacgcagttggttgttaagtagcaaatactaattctcaggataaatatggcagatagggcctaaagagaaagttctgaacaagactccttattcctacagtacagcaaaaactagggaaagcagcctgggaaataatttggaagagaggatgaaatggatttgcatattttgaacgtgtaaaactttaatgtattgaaggaggtacacagagtggacaacagcaggtcccgaggggagtgagatgcttaagactgacctttgagatccctatcaatatgtttaaggcaagacttctcagaagaatgcctcccacatgattgacaggggctatgttccttgctctacctttcatctaacatctctgctctgaccctggtctgtgtgaacagaatgtagctaagaaatgaacataacatcttaaacagccccataatggccaacttattatccagctactatatccggctactttgatgatgcaaaacactgctttggatttcatttgaattttaatctcacattctaatctcatccacgaactgactgggacactaacatattaaatggcttatataaagtattaaaactaataagagtggtgactgaatcagaatccagagagtatctttcagggatggctttatcatgctaaagtcgcctttcctattgttgaggtgttctgagtttcttaatcatgtcatgaagccttcaaaaggttgtaaatggtgtccttctacctgtttttatgatcgataagctacatttcataaatgaatatcttaaagagagtccctcctttcacaaccttgccatttggaaggacacaggatatttgttattatttttaccttataccgaagaagctgataaagtcactggataggatgagtggacattttgagagtacatgccttatgattggtgttgggactcagtatcttgaaaataaaatgatgtcagcagttcagtttgagttcttagctttctcagttaattccatcattgtggccctgataaatatcctcattagttagatatttctctttactgaagacttaattcaccttagtgttagtactcaatttattattttcttgccttccttctctgtgcacaagaacacttgactcactgttgcagtgaatggagttctgtaccccagtcacattttaacttctccctagtggtattattattattattattattattattattattattattttatttctttgctttatttagggaatttacaagctatcacaagccaattttagaagtttaaattttaattacaatttgatacatatgttctagatttagacttttttttcatgacagatttctttcaaaatgtattgctgtcttttcttgatagtcaatatgtgctcaataataaataatgctgagcattgaggatctggtgccatagacgtttgtaactctgtcctatacagcttccatgatgggtatgatccagatctgttgaagaaaactgagataaataattttcataatgttgaatattcattttataatttgataaaattattttataagtgcatgtgcctatggatgtatgaacattttaaatacataaattatgttcataaatgtatatatgtatactaaaaataatacacatttatttaaacgctgtaaatccataggcaagaaggatagaaaacatgtataattcaacatgtactcccaaggcagtaatttctccaaacaaaaatattgacaattgctgggattggctattgttggtatatcaaaagagatggaagccagaatttggattctgcagattgcaggagttcttcttaaagaaaagcagtgtgtcccaagcaaggacagcaatgtggagggaaggtcaatggggttggtttgccagttttgtgtgagtgaaccttcaatgactccttaaaaattcccctagtaaactctctacatgagacctggtagccataaaaatgagacaattgtcccatctaaatgtgtcttaaggaacttacaacgtctaccagtctctagaaaagttcaataaaacactagtggaaagaggcccttgttgcacatatttctttcagttctgttaccctttctctgtgtgtcaacattggcaaaaggaaaggccttgacaattgtttcgaccattcttctctcctaagctgaaaatgacaacagggcaagggataaaaggctactgggtccctgcagatatttttcttttgcttgtctttaggaaaatatctacctacccctggatgatggcttttaatcatctttcatctaaagtttgtgttagtatgtgaccagggacaaagaataggcatttattactattattattcttttaattggatattttgtttatttacattgaaaatgataaccccttttctagtcccccaccaccacaaaactccctatcacatccctcctccccctgcttctatgaggctgctccccacccacccactccctcctccctgccctgtaattcccctacactggggcatcaaaccttcacaggactaagagtctctcctcccattgatgcctgataaggccatgctctgctacctatgcagttggagtcatgggtccctccatgtattctctttggttggtggtttagagcttgaaagcactagggtgtctggttggttgatgttgttgttcttcctatgaggttataaacccctttagctccttcagtcctttcattaactcttccattgggaaccctgtgctcattacaatggttggctacaatcttccacctctgttttcatcaagctcttgcaaagcctctcaggagacagctatatcaggctcctattcacaagcacttcttggcatctgcaatagtgtctgggtatggagtccagggaagtcaccctctaagtttaagcatgacaataggagatgcaaatctatcacattagcttttttttttcagtaacaggtgaacatactatatggagaatgttcctctttaagtaatgaatactttttggatgtcaatatgactatttattagcagcccatgcattagatatgtgcacttacataggacaactcaagattttccttggcagatttggggcctacctcatatccttatagaaactgtgtaatcctttagcacccaaaaagacaaacactgcatttattctatgcgacttcttgccatgtgcctagttacatggtccttagtttcatatgatttccccatgtctgactcaactcaataatcctcttacctaatgtcccacattctaattcttcccaagctcattggccaatagctttatcttgataagtgaatgcttttcaagtgaacaagagattatctcttcaaaggaagaaaattcctggtgtgtaacttgtgtcttgacttctatagttttattagaacagcataagttatagcttttatatctagcaatcctcaacaataacaacagcaacaacaacaaaaaaacaactacataaaacaaacatataaacaacagaatagtcctgaagtagagagagctcttccaagactggagattaataatttttcttaattttgcctgcgtgtaggcctggctgattgctggtcatctacctcttgctgagcttacaagctaatcagtacctgagtctctagagaaaatgtttccaaacctgccccccagaatagtagtgctatggtcttcatacaagcatatttcattgattttttttttcagaactgtaaaaacatcctgtattaaatgatatgcttactgctctctgttactgtagtcaaatcaatatttgttaattaactaaaggacaatattctcatcatccctgtcattttaatagaatcttcttggtaaatgtgtgtacattttcactatgtctatgtgaaacgtgtttacccgactcctcgtccacctcagctgctactataccccccttccagagacagaaatctactggaaatataaatcaaagtctgatatacctactgagtggctggactgatgaatgtggcattaaattaagtgcatccattcagacatgtgaaaggggaaatttttttatcttctgtagatgcagattttaaggagatagtttgtgtttccacctctaaagaagctgtgccttcttaagttttatgtcaaggcaagcttaggaatgacatttggaagagatagcattgaggatgtggcaattcctaacccaaagacccaggtcacttacaactttgcgtgcccatttgcttatttataaattggggatcaattcacacttgcttctgctgtttgagtgggatatcaattattgtacataagtactgagaagacgacctggcatgtgggaagcaagttcaagctgtgaccaccaacaaaaagtatcctaatgacaatgagagagaatcacttgactcatgtacttaacattcttattttttttactggtcttttaaaaacagagggagggtgcagcatcaggagtatgggtgtttgactccctcatcctcctctggtgtgtttttgtagcctcaaataaaagagcttcagtttcttttttgtagacacttaaatctcacccttgtaaattttaagaagctgctgggatgtttgaaagaaaatgtaaatttctaatcctctaatagatattttgactttagaatctcctgaatgggacaaggtaaaaatatatatttttttcaataaacagataagcaaatttactgcagtggtttgtagacaatttgagcaaggtgacctttcattcattccccattagctcttacatgtagaagccaatgcttatgcgtaacaaatgccatattaactacatcacataacagcctcgcaaggcatacaaaggctaatttcagaagccatattgactctacatttgaatgcctctagttacttgtttattgggtaacttaatctagaaaggctctttgatgaattttcatcaatttttcaacaaaaccctgttgcaaatggtgaattatgcattagcatatgttcatgctaatttatacaccactgacagaattttggcatgggattactaacttataattatattttaaagttcatttattaaaaccattaagaatttggaattattatttagtaagtaatgtgtcctttgaacctgatgtaaagaaaacagagaattccacagttctaagatgttgacttatttgtctaaggatgaaaacatgaatatgaactaatgagataaatgtttcctgctcttcttaattaatagatttacagccttgcttgattgtctgctgctggttccttgccatcagacattaatgcagtatgttgttacacaagtctctcttatgtccaaacaattatagaatagcttgcttaggtcatagcactttagataaagattatcagtcaactagcttatgaaaatgtaacacgtcattgctttttcaatattttttagaattaaggccaagattcctacaaagaagcaaaaagcagtctttgaagggtatcccatatattcataggcagagtacttttatttaaacataaaagaattttaagtaaactttatttctagaagcacttgcatgcaaaataaatttgaatgaaataaataaattaaagaatgaagattttgataattaatgatatttattcttctataaaatattatcataaacccttggacaaacctcccttccttcaatttttatatgattaccagtgtaattttctgtcaactttttggaaaccctttgataaatggagtttcaacctttggatacttagtagtttattcacaatgattaatttatagatttagaactccagaatatgacaattttatttcaatagaaacctcacctacttgaagtactaagataaagtcaaatgtttacttcatccctcaggccatgggcattagagtcaaagattgctcatgacctcaggttatgtcttggaggggccatgttaacatctctgcaacttcttctctaggtggaggggagagagaaaggaccacatttgtttcttattggcagatttagactagttatcaatttctatggaaggctgactgggaactagatacttgttaacaaataggtgggagggaaagtgcttaatgagaaaaacaatgagattaaggagaatagtaggaaagaatgaaaagcacaggagatgacttctgtcattaacctctcttgtgtttattgggtgtttactatctttattagattcttgtctcttatctatcaaatgaaaatcatggtttctgcttactttaatagcataagttccaaatgaaaaattgtggaaatagttttaaattatataactttatttttaatacaggttcagaattgccatgacgacatctcccgttagacagaattcatatatttattcttcctgtctagaagtttcagggagactagtgtttttgaggaaaccttcctgtgtgagttagaccaagttgaagaatatatcccgaggcagtgcttgaggagagagaagctttgctcagcatggagcagagtgtctagcaggtctgatggagaaggtaaaggaaagcgagacaagagaacacagaaacagaaagccaagaggagcatgcagatggctaccagcatcccagtataagtctcccatcaagggatattactgtcagtgctcacaaataaacagagatattacccacccttaactaaccatgaaaagtttttcaggcactttgcggagtagtaaagaaggcttagtagttggtatgttccaattcagtacactctgatattaatgagtctcttttaggtccacgtaatgaacactgacctaaaatacagaagccctgggtttgaggcaaaactatcttatagacatcataagcaagtgttactttgtttctctgtggatttagactgtaatccctgagtactgtttaaggggggataataatgtaatttttctgaatatatttaaaaactttaaatgcaagtcagtactatttaagttcaacctctctataatcacagaagaatgtgggcttctaattaattacctagaaagttatggaattgaatatccatttacacactcacttaagctcaaatgtagacacattaatacagatttatttcaagatctgtattttgccagtgatgtagaaacaaggataaggcaaaatattctgcctgtactagtttcataaaatatactttctcttatcagtttataagcatcaccccatatctaatatgatctgcaggaggcaccatttaaataccagatgaggcacatcatcacattctttgccattatacaaaataaagcttactggaaacccttttgcaaaattggcagtcatgatagcatcattctgataggtgtataatttaaggtttttactgcttccatctacgtggattaacaaagagccacacagcaaatgattccactccccatgtggtggaggaaacaatcaccgagaaatgtcttgccatgagtacagaatagtagtagatctactgcaatttactcttctccctttcaactcaactggaatgtatctacacaccatgttcaatcagctgggaaatgtgattaaaaagaaacaaacatcatttctctttaaatacacagttgttgtgtatgagctcgcagaatgcgaatggtgcttacgtgatcacagaaacactgtgaatgattctaccaatgagcaaacggttggaaatgttttattggtcatgatttatggatgacatgtttgagtaattattaagtttaattgcactgaaatgatgtagttttaccccaatttcttatcagtggggcaaggatgaaagcaaacgtggtagaagaatgtagaggtcagcgattgctaaatgagcttattaatgtttacacatgtagcaatttaagccattaatatgtgcatgtgaaaggagatgagcactcatttcagcatggagaagttgctgcaaataccatcactgctgttaaataaacattcagctatttcatttcagtcacatatccaggttgtccttaggttaattttgctctacttgtggctgataaaagtattttcaagaaaatgaaattactctacctacttgccatgcactagggctttaggtcaagagtgtatgtgagttgccaactctggggaagaagggcaaagtgtgatccttagggaatttgccttatattcacagaatgattttccaggcatcccattttacctttgatacaagggttcagcaacataaatcagcctgtttttgcaaagaccaggatgaaacactgatttagtcaattctaaaccttgttggtgttcctcactacagcaaagttaatgaagaatcttgttgctaacttaaaatgtaagcccaggtgatttaaaaatctatcataagaattcttgtataatgaactaatcacaaatcaggttgctttttaataaggacaatatgtgtgtgtgtgtgtgtgtgtgtgtgtgtgtgtgtgtgtgtgtgtatcatatatgacagataggtagatctcacctttcatttttttatctcatcaacttttccaaaacactgaataagctaaaacatcattctcagaaaataagatcaatgtaatattatgtgtgtgaatacacatatatatgtgtgaattcatatgcatgcatatatacatgaacgttttaagattacagtagcatatgctttctttgatgcttagaatagggacatacctcattaatttgagaaatgagaaatttattataaagatgtaaatgaaaacaaggatctaagaattttggctttattaatatttattttttctttctttgtctatgaattggactttaaaaattttgtacatccgggctttaaatgaaagaaggtataataatacttactgacagattcacagagactggaacctaagctttatatctggacatcaacattttaccatctgtcaggcctactgaaccttacacagccaagcccctgggagcaagagttcactgtgcactaaaaaagcctcccatgagtgtgacccttactcattgtcagtctggtatttttgctcagattataattaacacccttgctgggtttgtgcttcctgaaaatttgtgcttattccatattctgtctggtaatctaagcccatcaggctttcagccaggagcagacatgactggtgactaagacaaggtgtaatgatcattcgtagaggtgctccacttattgacacagggactggacacacttgtttcacatgttcaattctatcaatcggctgtttccaagttgaaacaaataataaatgtactgactgactatcatctgatacttatgaagctatgagtatgctgatctttacacctagttttataaaagaaaaccacatgtgcatatatacatatatgaatatatgtatgtgtgtatatacatatacacatacatatacacatattcaacgttgctatgaagactaataaaattgtatatatgtatgcacacacacacacatatatatacatatatgcacaattttattggtttaattttttgtttttttgtttttgtttttttgttgttgttgttttgtttttttcacattttttttattagaacccacatgtccctcaacagaaggatggatacagaaaatgtggtacatttacacaatagagtactactcagctatgaaaaacaatgaatttatgaaattcttggacaaatagatgtatctggaggatatcatccttagtgaggtaacctaatcacaaaataagtcattagatatgcactcactgataagtggatattagcccagaaacatagaacacccaagatacaatttgcaaaacacaagaaaatcaacaatacccatgctaacaaaatacccatgaaaggagttacagagaaaaagttaggtgccaagacgaaagtatagactatccagagactgccccacccggggatccatcccataatcagccaccaaacccagacagtattccatatgccagcaagattttgatgaagggaccctggtatatctctctcatatgaggctatgccggtgcctggcaaatacagaagtggatgctcactgttatctatgagatggaacacagggctcccaatggaggagctagagaaagcacccaaggagctgaaggggtctgcaaccctataggtggaacaacaattttatttggttttcaagagcaaacatgaatgtctataacaattaattactaacccggaatgcagctatttttctctaggtaaaattcctactctaacagcattataaaatagtcatttgtcttatgggctataagaatattttagtaaataaaaaatatgcttattatattatagcatatttcaaatcgaatacagaaaaaagaacattctatatttagactgttcataatttaaggaaagtttcctttatgtgttgatatttatttttataagatgtttatcacataagaatcatcctgtgaagtatgccagatgttttatgcacacttatgcacacacacacatggaacatgcctacatataaaaatatactcacttcatgtaaatgcacataaatatgcaaggatacatacatacatatgtgaatacacagacacacctatgagacagggtgctttggcatgtagcttttagtagccaggtgattttctgaatcctttagcaagtcatgcaatgagttggaatggagtcatatgagctgttgtcaaggtctggctttgggtcctctttccactaccttttcattacagagctttgtaggcagtgttatctctccatataagaaactctcaagcttgtagtatagaaaataggattcttgtaggtgtgaatgcaaaaatagttctcatcccaaggggaataagaaatcatttatcctgagccaaatatgaatgaccattgattgcttagcaacagaagcagacaaaagttactttgaatggcatgtttcaccactgtatagactcatgaactttttatagtcacttaatgaaagttacaaatcacagcatttaccaaatgactggtggggctctcaggtcacagttacagaaaagtaggagaatctctgctgtagcttctagttgggacatgataactcttggcttctgcaatggtgggaattagtggctagggaaagacactccacagatttttttttaaaacctggtaatcaaaagaatgttagatacaacatcatatacgagaagggggaatgcatggatgctaagggaacaaaaagtaatggacatggcaatgtagatgctgaatctataatatttcatttctccataatcagagcttgtggaatattaaatatagttttggcttttttaaaaagtaatttagtgcacattggcttgtactgaaaaaagaagaggtattacatataagcaaacctgagaaattgcacctgggaaatgtttaacacagagaaataaaatttaggttcttcagtgcagtgattttctactctaccatacatttaggattaaaaataccatttctcataggataataattaagcttccaaattgtagagggatgtacattgactatattttatcatgaaaaacattatctggtatgcaaaggcataattagggcacagttccccaaaacaggctaatcttctgatcttccttacctgttccaaatcctgggatagaaagtaccataaggagaccacaggcagcatgttagcttcccataacactagtctcaattattctcatatgtttgtttacttcaagacagatgggaaaatgacctaaaatctctagatggatgatcctggactttaaaaacaaacaagcaagcaagcaagcaaacaaacaaacagatttttcagtaagaaagatattggtgacaaaagggtttgatgttctctgacaccagtgtatttcttagtttccattaacttcagaaccaccaaggtagacttctaggtgcgtgtacttcaccgaggaagcagctgatgcctctaaactatctcctctcttcttgacaattatcaggtctgcttttgatcagttgtgttatgcctttaagattttgatcagttgggctatgcctttaagatgtgtattatcaggctctgcagatttcatgtgtgatgtgtggttcatataaaccatggaaacctaagactctcatccacttgaatccaggagagcaagcagccactataaatcctgatcccaagagcaggctggaaatgactaaggttctgctccacatttgccagagtaaatcattgaacacttactttaaataaagaaatatggtagtcagatgataaactgttttaaacatgtttaaaagtagggtaatatattcattaaatgatggttgagatttggcatttcaaacattgaaaatatcaaacatattttcctggttcttaatatatcacaagactctccttcctaaaggagacagttgaaatctatattccccccttccctgatcaacagcctgtctagctttcctgacttaatgagctttctttttaattttgcacgatttcttctatctttatgtccttggctcatgaactatgctcaactcactgctaccttagagtatttcactcgcatccattgatacccaaccttcttcttttttcatgtagctcgtcctgttcacttgtgtgatcagtttctccacgcactcaatcctggaaaggtcctctggggttctcaagcccaatgcagctcttatttgccatcaataataacaaacaaagatacaaaaaaatggagaaaaaagtaaattttttaatctaacacactatcttacacaactattaccaccactgttgtctcctagttacctctgctctttcacactgcagaataaaaacatgagagcaatcactgaagtcttcatagtgacatatgtaacctcaatgccacgaccaaacttccaacatatctggattgttttgagagaaggggccatgctttcaactgcgggttgtgtatagacagtaatctaaatccaagggttatcctattttcttctataaaataataaacatgtttaacgtaggatttaaaggaaattaaaacaaagcacaaacattaactctgtgttcatgattacaccatcataatttgttcatattagactataatggtatgcatccattctcttaatactttgtgttagttataattgtagaaactgggcagattacatttcattgtaagtcaccttcattgtagtaattttgataagttggcccattattacaaattgatctgcatattaaatgcttcaaaatacagaacataattgatgctagtttagtttcaagggatctttctatataagacaaatcatatttttaagacattctgagtttcagttttgtattcccatgatttattttcagtgggaagaaaatggctgaaactgagtcaccattgactgtactgtgcgtgggtagtggtttgtcatatatatatgacaaattcattgagaaaataagtacatgagtttctcacccacaggatggtgagagagaggcaagtgctttactgtgtcttatttttgtgctgtccttttggttactttctacagcctagagaccaaaagtcatagacagctgaaacataaactaacataaaatacacacctttgccaggcatggtggcacacacctttaatcccagcactcgggggcagaggcaggcggatttctgagttcaagaccatcctggtctacaaagtgagtttcaggacagccagggctacacagagaaaccctgtctcgaaaaacccatacacacacacacacacacacacacacacacacacacacacacacatgcaccacattgaataatttgctatgtgaatgtaggacatttttctctgattatagagaaacataatgcccattatctatcacacccactcacaaccattggcccagtccttgatcagctcttgatcaattcaccttctgtccataaggttttgccaattttggacaagtaaataagatcaaacaatgtataatctttgaaaatatttagtagaacttgttcctgattcagttcaaatgttactgtagaaatgttactgaaaagttcttaacccttcttttgatttacatcaatgctaactaatatcttaatctatatgataaataggatatgggcatgaatacaactaattcaatctattcagattgttcaaaatttcttgcactcatttagagcacatatatatcatatagtcatacatatgtttctgtgtataatacacacaaacacacacacacacatatacacacatacatacatatgtatgtatgcttattgcatttacaaaagataacaatatcataaccatgcttaggctcttagactcttatgacgctctttgatagcctcccattcccaacaaacacattattattctagctaataatttcccatccattcctaaaacttaacctcataatacagaataaacatggtgtttacccttttatgttttaatttattttggttattataaatttttgcagattacaggttgctgcataattcagtcattcattattttttattgttgagtagtattccatgtaagcacaaacattccttcagccattggcctaatgaaacacatgtagagtatttcaaatgtaggaacattttaaataaagcttctaagaactgtcatatttagatatttggtgtgccaaataagctagcattttttaatcagtgtctaaaaatgtgaatgtgtttccatatgttatctttatgctaagatcataaaaatgactaaactgtttccagtatggtatatcattttgtatttataccaattatccaaaaaaaatgtgggcgatccagtttttccatgtccttgccagaagcttcctttctcagcactgtttctatgttagtgatttagtggctataccttggtaatctggcctgtttcacctgatacaacatctcaaaggtttagttatgctacaacatgaaacgctgatgtgtctgtttgttttaaaacaggaagtgatattctattgtgtgaatgaaatgcattttgtttatgcctttaacaattaatggaataacatgattattaggggggaaaggtcgttctgaatctgttttcattaaattatttacaagcttagcctctctttttaaaacaccaagaattgtaatgggtgtgtgatatgcatctttttttcatgcaaaaagcaagagcaaatgattgttccagtgcagtggggtcatcccagacccaaagaagaggcggcaacccctggcacccaagcagcgagtttttatatggtttccaggggcagagcaccagcaactaggcaaaatatgattggtggaacagtgcaccctttaaactagttggtctttagagattgagggaacaaggacttcccttttctgaaggtgggcaacagtgtgtcctgcagaatgtgtccccacctgcaggtcagttcctgccctgtggtctgagaaatgctaattagcctctcccttccagagcagtgtgtttcatgaccttcccaaagtttctaagctgactttttcattccccccttttctttgtgcacgcttcaatctggaagctcttgtggacagttatgcagctcatatccctggtccactgcacttagttcttgatatctttgtctcagtaccatcaactgtaccatcacctatgtgagttttaataaaagcaactaagcaatttagaatataagggatcttatcaccaatgtggcatgaagattgtgtgtaccctgatgggatgaattaccaacaaaacgtgcataataaaaagtgaggaaaaacagtaggaaacatatcataaagattatttttaaagcctggataaggtcagcttgaaaacaaaactttcaatatgaccacatcagacttgctgtaagctttcctttatttctgacaatggctaactgtccaaataaggaatccacattgccaggtttgcactacattcaaagtacactcaaagataaagaaattaagactcgttcatttactgaacaaatatttattgagagcctaatggtcactggacttgtggaaagcatatctatattcaggaaaggctaattaacttagctcaggtcacaaatttaccaaaagaatgattaaacacgacattgcagactgaaagtaaaaaaaaagaaaagaaaaaataactgtaatacttgtttttacaagaccataattaaagcaatctaagaagacagtttaagcttaagttagctcattagtgatagttaatattagcaaatatgtgaattattaattattattttgaaaacacaaacacagattctgtttagcttgtcaattcatcttattacttacccttacaggcaaagaataagagctaagccacctgacacactgtgtccttattgtaaatttggtccaacatcattatacatagcttgagtctggatattgaatgcaatatatcattaagtcactaataaacttgagtctctccttctccaggttgacccatcccccactgtcaatgagtaatttatcttcagcagcaatatgcataagtcgtctttgaaaggaggggacatggcattatcagtcactgcatggaggagttacagccaactccatcatggaagagaacagatgattacaatcaataatcaatcaaagaaccagtgacagtaatcatacatcacatttcactgtagaaccttttcccaaagaattatatttgaaccctgtttctagttatcctggtactcttccactgtctagcatctgcccttggtgtagaatgaatatggaatagaaagtatcctacttggaaatattaccaacactacataaagtataataaggttctagtctctgcctgtatccctgcttcttactgatgctgaggtagtaatggatgtttcaagacagcacatcttcattgtgttgtgtaaatttaaagttgtactgggtgtcttcaggcagagtttgttctgctaacgaagtggatgagtttctgaaacttgtccaaaactttataactgggcatggaaataatatccaacaagataagctgtccaaaaagttacatggtgcttatacaatcagatttaacttagaattttttctttgagttttatttgaaagtaaatactttcagaaaaggattgaattaattttcagaaggaaatcatatagaaataaaaacaatctacctgaagcaaaggtgatatatacttagaaaattggtgcatggggttttttaaacagctattttccaacaaattcttagcatctattataggctgggaaaacatttactcttccccttaaagaataaaatatatggtgtaagaaaaagcagatgtctagttatataatacaaactgtttgatgttgttagggattttgttcacagtgctcaggaattgagagtacaaaataggaagggctgaaggagtctgaaccctcccataataggctgatcttaattttagaatgggaagatatgggcagcttattcctaagcaccagttcggacatagagtgacatgctgcaggagaacacagagtggcattgctgacaaacagtggcaaatggagcatgcggctccctgtagctggatggtagctagactgcccccagtgtcaggctgagaactcccacattaagatcatatactaagtgcaacatcataatttcctgcagtaaaaccactttttagagattcagatatctttgatatctctccttaaaattttgaagggaaatagattgatagggagcaaggtcacatgtttttgatataaagaatctttggtaaatttcaagatatcaattaatctagaatttgaatatttgggggaaagttgacccccattccacaaggcacaactctggaggactttcattctttaatatatagataatagatagagatgatagatatagatatatattagatatagatgatatatatatataaatatatttgtcaagatttggtctatatttgaattatcattttttatgaaagaaatataattgccaaagaagactcccaaacatcttttgcagagattttgcagtctcaaaaatgttctcccttttcatttctgtattgataagtatcatcttctttcaaaaaataaaaagagccagatttgattattattttcttcttttgaagcatacagtgagcatggcaccacttttaccttctctccaggagataggcagtaccaataagagggcacatgagcccttttggataatgtacagggccaatagattagattcttttatattggggagtttaatcatgaactcttattttctttgagcttctcctcaagtcctaatcttatcatgagaaaaacctctcctatctacagaacaaacacaaacttcgaacgatgttgttatactgttgcttccgggaatggataaataaataaatgcaataataagtaaataaacagatgtagcagtatttcaaatctctgctaagatatatttagagttggattacaaaacataaacaagaggctgtgggttagaattttaaaattattagctttcatacgttctaaaattaggctgttttgtggggaggatttggaaatgagctttttaaaaattatgatttccattcaatgtgggaaagtaaacacagtgcctgttgaggctgcagcctgtaggcaaacatggagtcgctgacattgtcctttgggatataaatatctccctgcatttgtaacttaaggactgcaaattacagtttagaggggacagttatagtccacagcatggatacatttttggatcttctataaccatcccctctcattaaatatgataggccttggagaaaagaaaaacaaaggaaaaagggaatacaaagatgcagattcctagggacaatagcccatagttctcatgtccagacactgtgattattcatcatgttactcattcaaaacaaccaatggttgccacaggacttatggaccaacaaccttacctgtgtgcacatggacaaaaaaagatgcacacacacacacacttaccacatactacaaagtcctatttgtttctctgatcacgtacacactttctacacaaatacaattattatttatccattgtctttccattctgatttggcctattagctaacaatatattctacactttctttttttattagatattttctttatttacatttcaaatgttatcccctttcctagtttcccctctgaaaatcccctatcccctctcccctccttctgctccccaaccccccactcctgcttcttggccctggcattcccctatactggggcatagaaccttcacaggaccaagggcctctcctcccattgatgaccaactaggccatcctcttctacctatgcagctagagccatgggtcccaccatgtgttttctatgattggtgagctcttggttagctattgggggtattggttagttcatattgttgttcctcctattgggctgcaaaccccttcagctccgtgggtactttctctagctccttctttggggaccctgtgctccttccaatggatgactgtgagcatccccttctgtatttgcaggcactggcagagactcactttctttagactctagttgttgcactcacagaaccttgtgccctggatgctacctgtgaataattaaacttgttcttcctaaaacagaactaaataattcactcaggcatttggactatttaaactggaattacttcctccatccccagcatggcaagtaacttctacttgtgtaccccaaaacttgaaaaataatttcttagggaaaatggctagatttaggcaactcatcaggcaaatctctttctggctacccatctcaatatgctagttaaggagatgagtaatggtgaaaagaggagattaactcagtatgtaataagaatcaacaaagaggctcaacaaccagaaatacatcttctaagtactgccccaagtgctaggtttagtgagagactaacttgatgcaaggaccaagaggtatggatagttaggaagcggtcctgctcagtgttgctctggtcttgcaagatggttcaaataaatcagtcctcatttattgagggggcaacatgaaatcttgtctttttgagtcactgttctatttggagagggtctgtcctactaccttgtaatacaagatgactcaaggggaacaactaaggaagaaaacacaaaacaaagacagtcatgctaagttttaatccagtgtttagttattgtggagcatattgggaagtcaacagtttttaggaaaagcagtttctaagtgctgttaggatctctgcaccattattctctcatcaccctctctcctcttagcttacaacacaagatttagggcaactccttctgtctgcctgtctcctatcactttagtactaatgatctttatcatttgttaggcttttaaaatcctatgacatgttcttctttactctctagacatatttcttgaatgctttcttaattttttggaccttatcatgtaattctttacaatcatttagtgaaatcatttatttacttaattccttatatttacttacttatttatttggacttttgagacaggattcctctgtgtagtcctgaatatgtcctagaatatgctctgtaaaccaggctggtcttgaactcagagacccacctgttccatcattgtgttcatctgtttcccccctccaatctcttccatatgccctccttgctcttctaaattcatagcccccttttcatgttgttatatatctttctctccacatatatggtcttacaataaaatgctgcatatacagctttgtatactttcacttcagtctgtgagcagttttctcatacaacctactcaactttacccatctcttctcaatttggtcctttattgtctttattaagtcactatgttaaaaaaaaatcctgccttgtattttgtgttggtttatgaccccctcacattcctctttcctctgaagtaattcagtgtaccaggtgaatcatcctcacctttacatcttcagtggccccatctttgatccttgttgagagggcaagatttttttatgtaatgcctctttagagagcagctgttcctgatgcagtgacctacttgtcttggcatatgtcctctctagtaacttcttcctcttcttttttttcctttctcttaaaaaaaaaaaagcctagtaacttcttataaacatgcatttccttttaaccttggttgtaaattctttcatagcattggttttctcttttccctttgcatattactgaaagtataggacatagctgactataaataaacacattagtgaatgaataaataaatgaatgaatgaatgcattaatatataatgcatagttagtatcatccatcaactaagctgacaaacatacagtgaaaaaatttaaagtattttttctttcttttttcattagatattttcttcatttacatttcaaatgttatccctaatgccccctatatcctttccctgccatgctccccaacccacccactcctgcttcctggccctggccttcccctgtactgggggcatannnnnnnnnnnnnnnnnnnnnnnnnnnnnnnnnnnnnnnnnnnnnnnnnnnnnnnnnnnnnnnnnnnnnnnnnnnnnnnnnnnnnnnnnnnnnnnnnnnnnnnnnnnnnnnnnnnnnnnnnnnnnnnnnnnnnnnnnnnnnnnnnnnnnnnnnnnnnnnnnnnnnnnnnnnnnnnnnnnnnnnnnnnnnnnnnnnnnnnnnnnnnnnnnnnnnnnnnnnnnnnnnnnnnnnnnnnnnnnnnnnnnnnnnnnnnnnnnnnnnnnnnnnnnnnnnnnnnnnnnnnnnnnnnnnnnnnnnnnnnnnnnnnnnnnnnnnnnnnnnnnnnnnnnnnnnnnnnnnnnnnnnnnnnnnnnnnnnnnnnnnnnnnnnnnnnnnnnnnnnnnnnnnnnnnnnnnnnnnnnnnnnnnnnnnnnnnnnnnnnnnnnnnnnnnnnnnnnnnnnnnnnnnnnnnnnnnnnnnnnnnnnnnnnnnnnnnnnnnnnnnnnnnnnnnnnnnnnnnnnnnnnnnnnnnnnnnnnnnnnnnnnnnnnnnnnnnnnnnnnnnnnnnnnnnnnnnnnnnnnnnnnnnnnnnnnnnnnnnnnnnnnnnnnnnnnnnnnnnnnnnnnnnnnnnnnnnnnnnnnnnaagaaagaaagaaagaaagaaagaaagaaagaaagaaagaaagaaagaaagaaagaaagaaagaaagaaagaaaagaagtctatggtccagaaagatgcctcagtggttaagagtgtgctcatttcttactgaagatcaattcccagtattcacatcaggtggctcacaaatgcctggaatctatctctagaggatctgagttccttgtcttctgtgggcacctgcactcaatgtaacctccccccacacacatactttgtgtgtgtgtgtgtgtgtgtgtgtatgtgtgtatgtgtgtgtgcgtgtgctcacagttttaaaaaattatacttgaattcactatatttacatcttatcacctcttaactttttcagaacatgaacatgtgtgtctctatgactatggtagtcttgagcattacataaaaagtcaatatagaagtctagcaagaagcaaatcaaacataatattgttcatatacaaaggcatcttccagccaccatgatttatgtacatgtaaaatgttctatataacttattacttgctacacaattggattttcattacaattaaactattacttattttatgaaaactatattattggcatttatatatcaaaaatgtctctgtggattcattttatcagattcttttattcaaagggaaagctgattttttaaatcacatatgtatatattttcttaaagtatgattctatcactatccctttccttttcctccttccagcccttctgaagccccctcccttccagtctcttctgtgcacccccactctcacactaatagccttattattacttatggcttattactgttacatacatatatgcatacaaaacctgctgattttctttttgttgtctctctctacatatggcttcaaagctatttttctatcatgagagtgatatcttataatttttttaaaatatcttttcatagtgttacttcaaagttagctcctggatacccaggcttataatggagacttgaaataaaggggcagacaacgttttccctccggtctattttagaaatgatcacagaggtctgagagtcttagtgagttcttggagctaaagtcatctgcacctggaaaatgactggatgtcagatagttggaagcatcaaccatctctggagaagtgttttcttgcccacaattctgcccaagagcatcagatcacttggtgaccataggcatcttgcgccctactgccaaatagagcagctagagacttgtgtactctgcaaatgacaattatataattggtgtcatcctgagacaagaaagcaaagaagtcaagggtggagcagagcttagcatctctaacacagggctcttcccttcattctctgccatgtcactcataacccattcctgtgtaaggaccatatggtcttctccttctgctctgctaagcaagagaaagcgctcagaactgggcagatgattttaattacaccgtcaaaacactgttggtgatctctttagtgccaaattaacaacaataatcaacttaaacctatttaaatgtttaatctcccctttctaacaatgcatgcagctaggcttcatagtcctgagaagggaaaatgtaagctttgctctgaagaccctcaatatctaactctagtactttcaaagcaacaacctccccacttagaacaggaaaagcaaggtgtgccatatggacgtgagatcctttctagtctcaaaatttttacaaggttttggcttgacttttgtcctgtctctagtccagaatatataacatcccttggtcttcactcatgttgagtaaccaagacctggatttgcatccttgagggtcctaggaattgctgtcagcagctctcaaatggaaaacaaaacagaacaaaataccttgtcactctctgattctctaagtgagcttatggttttgaacatgaatgcaggtgttctccctagnnnnnnnnnnnnnnnnnnnnnnnnnnnnnnnnnnnnnnnnnnnnnnnnnnnnnnnnnnnnnnnnnnnnnnnnnnnnnnnnnnnnnnnnnnnnnnnnnnnnnnnnnnnnnnnnnnnnnnnnnnnnnnnnnnnnnnnnnncatatcatttttctatggagcaatgcaaatctcatttttaaaactgaagattttttttttggagatatttagtaacattccctaaaaagttggaaggaatcaatgggtgcgagtttgaacactgacatatttagggtgcatgatacataactgcttttaagtttttttaaatataataaaaatcaacagtaatatcctagacttagtcacggaactaaatgtgtaactctaaatttaaagaagcacattgcattgcaatattacaggtatagagggtttactgttgaaagcagtaaaaagatgtggaaatgcagttcggttagcaaagtgtgtgtttgggtgtatactacatgtgaagctctggatttgatccccagcaggccctagataggtcacactggtgaatgtctttaatcttagcctgtggtactttcaggcactaggaccagaaactcaagatgattctcagctccatagagaatttaaagtcaacctaggctacttcggaatgagcactaagaacacaaatcaagagttctgtgaactagaaaatgttgtattttatgatcccactttaacataccatagaaaattaagagcaaatataaagtaaacttcagatctgttgtgaaagatgacatgaaaaggatactagagtttgtcttggagaagtaatgagaaactgcaattggtgccaccaaagagttgaaaatctgccagaaagcgcttagcttaaggatttgattgatccatacattcagcattcagttcagaaacccaagaaattaggtttcacctcagaacaactggttccttgcttagatctttaagaaggggaaatggctccctgcagaggttgagttctttggcaagtgaagtcttcatgaagaagattgaagaagtattactactcgagacagacaacatagacagagaaatgtgtgccagtgtagcttgttagtagtcatatcagagaaagtagaagaaacaggatattaattgtgttgtagaaaactctgcttagtgcaaaatattttaaacgttgcttcaacagaaaatcattagatgacttttaataggaaatatgatgttactttgttttcttctggactttcagaatctgagttacattttacagatacagtgcacttctttaagtagcaaaattcaagtcctccacatttgcctggagctcatttctgctgtgttgggtggtgaaattttaagctaagaaatcataaaacgtgactcagtgggtaaaagaagtgcatgctgtgaaggcaagaagacatgaattcaattcccagcactcaggtaaaaaaggtgggcatggctctgcatgcctgttagccacagcatcaggtatttggagactgacaaatactgggagctgtctggtcagttgcctaacaaaattgtgaacttcagattgagtgatctactttgtcttaaaagataacatggagagcagcagaggaagacaagatatacgcctctgcttcaagatatgcatagtatgtgcacacaaacctatacatgtgcatatgacacacacacagataaatacattcaggttataaattcataaaaccgaattcaaattgatgtaactcaagcatgtactcttggggcaaaatagataggattttctaagcaaatattttttgggtaagatcacagatttaggtttatgagcaagttgttaagtccatgggggctgtagagagcagtgggcaatgaacagccagggtcacctttactctaaatggtactctagtgtgaattctgcagtagaactccctctggacaaataataaccatagatgcctctgacctttattccaagccaaggcaggaacctcagtagagaggattgtaagctctcaagccttgccattaacctgagacactcctggcaggagtgcacctttagcttgccagaggaagtcaggactgcagactgccttctttagtggtgattggtagtgtttataggttgcagaatgtgctgtattccagaaatctcttgccaaataaagattgtcaacctttgaggttggcagtatctgtattaccagtcaaagaagaacactctgggaatcacaaatttttaatcaataagcatgttctcttatttgggagttggaggagtggagtgccacaggacagagatggaaaagaaggaaatgatgcaaacatttcccgaaaatagtgctcatccaggcagggaaaggggtttggccattacttgtttgcttgcttattttgcacatcattgtttcaactctgaagcattggaaggttttccacggctgtcactggctgtcccctgaagtccacaccttgtcatgcaggggagagaacacctggagataactaaattgaagcactgtatgttttgacaccagccaaggaagaagtatgtcgttttagtctatttttaatgtcatccccattggcatttccatcttttaaatttttttttcttgtgacaccacagacacacttccccctgctgcctgcttcctgtggtgctaaatgccaatgatcacacaggtcacattttgtatcaagaacaattgactcgggcctgctgggacgttagtttgttccctcaggtcagactctcctctgggcttcttgctgtcaagacttgagagaagaatgaaaggaacttgtgaggttttagtcccatgtaatttttctgtactattacctgaaataacacacacacacacacacacacacacacacacacacacacacttctaacacataccttgcatacacacacaccacacannnnnnnnnnnnnnnnnnnntgcctcccctcattcccctgctctccaacccacctactcctgcttcctggccctggcattcccctatactgaggcatagaatcttcataagaccaagggcgtctcttcccaatgatggccaacaaggccatcctctgctccatatgctgctagagccatgaatcccattatgtgttttctttgattggtggtttagttccagggagctctggggttacaggttagttcatattgatgttcctcctatggggttgcagaccccttcagctccttgggtacattctctagttccttcattgggacacaagtctgttctattcttagcagtgaggttttactgtcaagttttggaaaggtaactaaaagaattgacaaaagtttaatctcttgaggcctttgggaactcactggctaacaattcaaaaaaaaaaaaaaatcagccattcctatgaccagaagttttgtttgttagtctcttgtttctagtaggtgcatagtaggtgccttgttgcctccattttaactaaaagagttaaaatatatacatcaaaagaatgtatatgtagaagaaaatttttaggaaatgtctacaggagtaagtttccacatggcttttaaaaaacatttctttattgtaaagcaagtctcactacatagccttgggtggccgtgagtgaactgtgacctctactacctacagagtgcaggtattgaaggccagtgccaccatgccaggcaattaggaactatttaaaaaatgcttagcagtgtggtgatgcatgataaagctaaggaattcctagcacatccattgtccactaaaaaaagaaaaagatgtttaatttgatggtagaatgaagattctgtttaatgaagtggcattctttttactttagcaaagcatagctttgaggatttaacagtatccacaagatgttgagtcagagctagaggagacactcagtttagggttagaagacttgaaggtaaattcttgagttttctttggatgactcaggatgccttcttgtgttatgagataatgagggactgctgaatgggccatgcttttgctgggctagtacctttatatagtgtgaatggccacatctcttggtgatgtccacttctgtgaatgataatactaaattctgagaggatgccagcagcttcaggtcagctcttcctaccacaactggcctatgaatacttttgactgtggaggggaaaaaaacaacaacaacaacaacaacaaaaaaaaaaacaaaacaaaaaacagatgacatgctgatcatcaccagtgggaaaataactctttactatgatgcttaataaacactggtgataatattcttcttacttgaataattttatgaagttataaagagagtagaatctaagaaaaatccacaaaagatgagagaatacagaacatctccaaattgttcttgagttgtctttttatgagtaaatctatgagaagaccattactatactgagatagactttggtgcacataagcaatgggtagcatgtagaaaccaggactggaatacagtaactatgcttttagatgtgctttctcattgatctcctctagaatgactactcaggttcctaaagtaaaaaacagtgatttatctcagagatgcacctgctgctggctttagggcagtctaaatgagctgccttgccctggcatctttcatccctgccttctgctgcttcacttcaggaccacgtctctcatgatgtttctattttctcttttttttccttttcctttttcttttcatttctttttattatcttctctctctctctctctctctctctctctctctctctctctctctctttctttctttcttcctttctttcactccagattttattcccctcctggtccaccctcccacggttccacatcccatacctcctcctcaggcccctatttcnnnnnnnnnnnnnnnnnnnntgaggttttagtcccatgtaatttttctgtactattacctgaaataacacacacacacacacacacacacacacacacacacacactcctcacacataccttgcatacacacacaccacacacatatcatacacacacaaatgcacacatgtgcacacctcacatatcacacacacacacacacacacacacacaatttctccctttctttagaactgtctacatttagcagaataataatagtgggttttagtaaggatttctcctatgatatatactttgtctaggcacaggttcttaatgtaataattatgtcaggtgtagttttaatcttgtggtgtgctccttaattccaattagaaaataatgggttacatccaggatgtttctgacactattgtactagtaagctccctttgcctggcctgttatgactgtagtacacagggttcatagctggataatattgatgtttattttttcccctggtagagtacatagcatcttccagcacaatgaaagctaaccaatagagttgaggtttctccgtaaggctcaatttgatttcttcattgttgattgccctagtctgttcttttttctattattagatattttctttatttacatttcaaatgctatcccctttcctagtttcctctctgaaaatcctgcctcccctcattcccctgctctccaacccacctactcctgcttcctggccctggcattcccctatactgaggcatagaatcttcataagaccaagggcgtctcttcccaatgatggccaacaaggccatcctctgctccatatgctgctagagccatgaatcccattatgtgttttctttgattggtggtttagttccagggagctctggggttacaggttagttcatattgatgttcctcctatggggttgcagaccccttcagctccttgggtacattctctagttccttcattgggacacaagtctgttctattcttagcagtgaggttttactgtcaagttttggaaaggtaactaaaagaattgacaaaagtttaatctcttgaggcctttgggaactcactggctaacaattcaaaaaaaaaaaaaaatcagccattcctatgaccagaannnnnnnnnnnnnnnnnnnnnnnnnnnnnnnnnnnnnnnnnnnnnnnnnnnnnnnnnnnnnnnnnnnnnnnnnnnnnnnnnnnnnnnnnnnnnnnnnnnnnnnnnnnnnnnnnnnnnnnnnnnnnnnnnnnnnnnnnnnnnnnnnnnnnnnnnnnnnnnnnnnnnnnnnnnnnnnnnnnnnnnnnnnnnnnnnnnnnnnnnnnnnnnnnnnnnnnnnnnnnnnnnnnnnnnnnnnnnnnnnnnnnnnnnnnnnnnnnnnnnnnnnnnnnnnnnnnnnnnnnnnnnnnnnnnnnnnnnnnnnnnnnnnnnnnnnnnnnnnnnnnnnnnnnnnnnnnnnnnnnnnnnnnnnnnnnnnnnnnnnnnnnnnnnnnnnnnnnnnnnnnnnnnnnnnnnnnnnnnnnnnnnnnnnnnnnnnnnnnnnnnnnnnnnnnnnnnnnnnnnnnnnnnnnnnnnnnnnnnnnnnnnnnnnnnnnnnnnnnnnnnnnnnnnnnnnnnnnnnnnnnnnnnnnnnnnnnnnnnnnnnnnnnnnnnnnnnnnnnnnnnnnnnnnnnnnnnnnnnnnnnnnnnnnnnnnnnnnnnnnnnnnnnnnnnnnnnnnnnnnnnnnnnnnnnnnnnnnnnnnnnnnnnnnnnnnnnnnnnnnnnnnnnnnnnnnnnnnnnnnnnnnnnnnnnnnnnnnnnnnnnnnnnnnnnnnnnnnnnnnnnnnnnnnnnnnnnnnnnnnnnnnnnnnnnnnnnnnnnnnnaggtccatcttctctgactgaaactagacccggcagtcctctgctctatatgtgttgggggcctcatatcagctgctgtatgttacctggatggagatccagtgtctgagagacctcagggaccaggttaattgagactgctggtccttttacagggtctcctccttctcagcttcttccagctttacccaaattcaaccacaggggtccgcagcttctttccattggttgatgtttctctaataataataataataataataataataataaatcaggtaacctttttgctgtttgagtcttttgtggggcaggaggtatgttagggcccttaagaggagggtgagggcaatggctgatggggcatcaggactcttgaccccttgttttttcctgttttcctccctgtgtttctattttctgtagcagagcctaaaggaaagcatctggggaatgaagaaggagacccaatggaaaaggtgtgtgctgggttgtcagggacatgtggtagccatgtgcctggaccctggagtcctacagccacttctcatgactatgaggccctatgtgttatacagtaccttttaagcatgacagtatgtagaatgcaatgttatattctatacagtgtgtctgtcttcatgatggttgctttaaggaaatatttgtaaacccacacataagcagaagagagtatacacatattgtattactctagagagctgagaacattaagtgaatgcaaaataagacatttcaacgaattatctggaaggtctacagtcagaacaaagcaaaaatgtagtaatgtccttggttggtattcctgaatccctagcatgtctacaatgtgtagaagagcatcttgaaatgatggagtggaccaatccaaaccctaacacaggaaaagacagaagcagaaacaatcacagtttattggaagtggcatagccttggctgtccagagcagagggagtagaaacttttcctttcagtcaactagttctttaatttgacagtccttggtaaggaatctatcagaatgatgacaactctgcaccataatggcaggatgaagatgggccagtggtatcccaagtgtacacaacatttgggtccatcttccatttggataaaaataaattatgttccacaatacataaatggactgtgcatattttcaaaaatatgcaataaaacttggtagattagattgtaagtccaggcttagcacttcagtagcttgaaaccttgtcacaacttttttctactatgacattttttggacttttttccttgtcaattggctctacagctgttgctttgccaattctcttgctctctgaacctataaaacagatgggaactgcatgtaacttggggaaagaatgccagagaaaaattctttctaccaaattgtcccctgtggatccaactcagaagtctgtcagatcgtgggcagccgggagaaatgtgctctactcagtctgagccatctaggtcagtgcagtgacagcgatatcaattatttagttaatctaaaagtttctcatgaggagaaaaaataaagatacatgtagaactcctatgtgattataatacccgtgattgcatctgggtaaagtggcctgtgatctcagctcttctttaacgcgtccagttctggcacatgctgattttctgtgttctcttgctcaaattaaccacctacattagtattgcctctggtgccgtcactcaagcacgtggttctatgtgtttattgaaataatttttattatctgtaatggcagaaacataaatgttgctcttctccctcacttatagaggtaatacaaagtggggagaattgaaaagaatatattcaaagattcttggtaaacacatatttaattttaaatacattacactaccttctcctcaatttggatgaatgactgcgttcaacaactgtgcaggaaacacatactcataaagagttattatcaatattcagagtataaagaatatattgtgtctataaaacactatgttgtcagagtgaggataaattgttactagacatatcataaggagtttaaagcactttagactttttgaggaaatttggtgagttttttacttctatctgctagctttgtatagtatcatagggaagatacaaaggtatattgtcaacagtttatggtattttagaattaaaaaaagaaattggggcatgggaaagaacagcatatgcaaatatattatacacaaacagacacaacattaatagcaatatatatatatatatatatatatatatatatatatatatatatacatatatgtgtgtgtgtgtgtgtgtgcttgcacgtgcatgtgcgcatatgtgtgcaggaatttgatttgaagactgatctccttttattataaaacattttgaaaacttttctggaaacgatccaggtagtaaatatcacagaacctttttcttatagcatctctgacataactagtctaattctgccatacattgtaaaagcagccacagagagtctataaaagaaccttcatggctctgttccaataaaactgtattgacaggaacagacaataggctaattcagctctgtgggctgtaagttgctgtctctggacttgagtaggaagaaagcaaacaggaaaaaaaacctataaatggatatttaaacattcaaatctctaaaatctcctattagcggttctaactttattagcttcttagaagagtgctttctctcgtagactacttgatccaaattcccaatatattgccttttaaacaaaatgattatggatttcaatgttattcaggcaatgctttccccaagccttagtataggtcaatactttctatcaatattaaaaattaatttgtcccatagtaagtataaatgattaatagacaattctaacatatatcttaatgacagagtactggtttctattgtgtagatatacagggtaaaactcatattgctgaaaagaaatctgattctttaatgtaattgaaaccaaaggaaataaaaagccatcttgtgaagaaaagatttatgtaagcttatggttgatgataatttatttttctgggtccattacacagcaaaacttcatggtggaggcagcagatattggagcaaccctttttcctctatgtacgtaggaaagagagtgaaatcgaatagcccagaaccaggcaaaatgttcaaagccacacccacccaaaacaactccctcaaactacacttcacccactagacttctagctagtatggccaatctttcatgtctccctcaaactgatccttctgagacttaagagtttttatgatttagtttgtttttatgtgtgtgaatgttttatctgcatgtgtgtctgtgcaccatttatgggtttgatattcataaaggcaagaagatggcatcagatacccaggaacctgaattacagatgattgctcactgcagagggaatgctaggaatgggaacgaggtaatctggaagagtgtccaatgctcctaaccacttcttcagccacaaaacatttattcctaagtgtaagaaacaactggacaaatcatgggtggatattcaccctaattaatcaatattcacatctcagatgcccttaagacaggtttatatgtccactgatggtggagaattgaagttaaggatgaaggaaattactttcagctagcatagatacacatagtttctctgtagcaacttctactggaaagaacagatgggccatggtattctttcagctctaatattagagtaatggggtgtaggatctgaatggaatatactcagtctggccttgcacaggtggcaacaacttaggaggctactctcatgacatatactagagaagtatacatttatagatactaccaggggagtatcaataaattctgaagatacttcatatctgaaactaatatgaatatttttaataacatgcctacagtgatgtctcaggttttgtataatcacttcttttattataagtatggtaaataattaccacaaataaaaaacaaaatagtttacacattgagcttcttggaagttttagaatacatctccccctaatttaactatattcagatgtgggtgttgacatacttccttctttccaggtatagatggtctcatccatttttaggcaatcactttcagggtatgaaaattggattggaagtgaagacatctgggcatgaagcatggggtccctcttaacgagctctaaaggcttctcatggttcttacaaaagtggattttcaaagagaggaactgacctagtatatgttgtccctaatttcttgtggaagacatcacatggatataaataaacgtgcactgtgagattggcatttggtatcccattcctaatgtgacagctagagtcacactgtacacaacagagatggagggaactgggtcatcgatgtctgatgtctgccatttgtaaatgttttgtcccacttgtatcctgttgtttctgtgaaaatccatgttttacatcttttcactctcacgcatttccctgcctaccctcttgttcctaaacaggtttactatgcctgtaaccttcctgttgttccctgagaatagcacaagtgctggttctccctatggtgggtcaggctctgttttcttggctctgttgcctttttcttgctacactcagtaaaatgagtatcctggaggagtgacataatcactctctgagaatcatcggaacggccaataccacttttacctaataacatcttctcttttgtttaacattcttgctagcagggacttgtatcttttactctgcctggtgttacctgatatttattatacactgaatgactttaactgatgacatttattttatacagctgggtaaggcccttgtcccttctcagagcttagctcatataatcttcataaccctgtatgttacctgtgattatattccacatccccgaagtgagaacgttatgatacaggcagcttacaccaccagagtcctatactccacaaatccagagtcagactccaaacccagcaggctggttcttaaaccatctcatgtcctacttttagtggagttactttgagctcaggcattcaaaggacatagagctctggagtaattgctatcagtattacttgtcattcagcccagatgcaggtgtacagagtagtggacaatagagacgcaactgccagcactcagaaacgatgtcttctagaacagaatcacccaaggaaacagctgcctacccagtcttactgtgagtttgacaaattcaatgaagatccatgagtacattctggtcccagtcattaactgcatacataaatgcaggaagaaaaacaaagttttctttagaggaattttaaatcatttatatagtactcacctttctcaaagagatagaatattaacactccatttctaaagtatgaaatacacagtgtggcttattttcttaaagagaagtatttctaaaaggcagaaaagaggaacttcacagtacaaaactctggcacacactagctcacctgagtgtgcaaattgtatataggctgcatattgtcatattaaaaaggtgaaactttcacacaatatcattattaaaataatactataaatcttcctacccaaacaaaaagctatagaatgtcaaactccaactcagtaacatttaaaactacccacaccatcccaaactaggaaggcctaagaaattatcacagacataggggcctaaggagatgagatttaaatagattgtgtagtctttgcacaaagaaagaaataatgaatagcaattaaagaaatgtaattatagagtataatcaatagtaaaatatcaagattggttcactgactgaggagaatatacaactttctttatatactgaaatgttatgaattgtatgtaactttacatgatcttaactctccattaacttaagacatgaagttattctttaaaatcttcattttttaaaaaataagtgaattatgttagattataagatgtacatgtagaacaaaatatattcatatctctgttaataaaatctgtctgattttcaacctcagaagaaattttgctatgtgtagaaaaaaaaaaagccaaagagaattgtactgaagttacttagcaaggacagaacgtggtaagtgaaaggaacactaggactgtgggccaaggatggaggtcatggcagagcacacttggcaggagttttctcctaactgaaatgtaagctctgctggaaacgatctatgtgccaagactcaggacagggggaaacaaatcaaggtggcatcacactcctgaaacattaccagagacaaggatagatatgtgattacctgtgaggggatacttagcatctggatcacaaattatgctaccaaaacataaggattaataagaccataagaacttctgctgattagacaatgatctcgaagcatcaaagggcgaaagatgttttaactaaaattttagtggtagcacttaaattttgcagtcaagctttgaataaataaataagatgctgagatctaaaatgacaagtgagaagacattttgaaaggttgtgtgttctccattctgtttatgacctctactccccaccctttgccgtactaattaatagccctagttaattaatattcctaattgaagagatggtgacggaggcaaggccatctgctggaggagtctggtctgcagctcagcagaatttacccttccattgcttaagcgctgatcaagcttatgttttcctctttcggcattaaaatgtgtgtcttggagtttgaagagtttggggctcagtagaggtgatactagtataggcccagccactcaaattcatgcctttcttttctctctctcatttgaatacatatacccagctaaaaataatttgtgagaatgataaagtaagataaaatgaaagcaaacaaataagagtggtacaaaacaagcagaataacaagaagtcataagaactagagaaagcacccaaggaactaaagggaactgcaaccctataggtgaacaacaatatgaactaaccagtaccnnnnnnnnnnnnnnnnnnnnnnnnnnnnnnnnnnnnnnnnnnnnnnnnnnnnnnnnnnnnnnnnnnnnnnnnnnnnnnnnnnnnnnnnnnnnnnnnnnnnnnnnnnnnnnnnnnnnnnnnnnnnnnnnnnnnnnnnnnnnnnnnnnnnnnnnnnnnnnnnnnnnnnnnnnnnnnnnnnnnnnnnnnnnnnnnnnnnnnnnnnnnnnnnnnnnnnnnnnnnnnnnnnnnnnnnnnnnnnnnnnnnnnnnnnnnnnnnnnnnnnnnnnnnnnnnnnnnnnnnnnnnnnnnnnnnnnnnnnnnnnnnnnnnnnnnnnnnnnnnnnnnnnnnnnnnnnnnnnnnnnnnnnnnnnnnnnnnnnnnnnnnnnnnnnnnnnnnnnnnnnnnnnnnnnnnnnnnnnnnnnnnnnnnnnnnnnnnnnnnnnnnnnnnnnnnnnnnnnnnnnnnnnnnnnnnnnnnnnnnnnnnnnnnnnnnnnnnnnnnnnnnnnnnnnnnnnnnnnnnnnnnnnnnnnnnnnnnnnnnnnnnnnnnnnnnnnnnnnnnnnnnnnnnnnnnnnnnnnnnnnnnnnnnnnnnnnnnnnnnnnnnnnnnnnntattttttttctcatacaatttattctgatcaaggtttctgtcctctagatcctcacaggtcattcccacctctgcatccactcaacttcagccccattctctctctcttctttcggaaacaaatggacaaaaaaaaaaaaaaaagaaagaaaaagaaaagaaaaaacaaacaaacaaaacaaaacaaaacaaaaaaagcaaacaagccagagattagaaacaaacacaagaaaggaaaagcaaaagaaatagaaacacaatttaaaaaatcttgaaatgtatagggactagagcagtggtcaaagcagttgaaaacttattacatgatcagtaagaacagagtggaaacctagcacccacttgcaattccacttcccagggtatgtgtggtgggcacagacaagaggattgctgaaacctgctggtttctaacctagctcaggttaagggagaaaccctgcttcaaggggtagggagactagagtagggtaatcaatatctccttgtagccactaagactatgtacagatatgtattcctgcacacatgcatgcacatgcatccacacagatactgcaatgccaagatgagtaataaatacatctttcaaaccttcataattactgtttcaacaatgaaaaattggcaaaccagaaaagaaaatgaatacttttggatgtgacctgtcaccttatttaagaaaatatgcacaaatatacacctaaaagagaaccaagagtgtctaggtgattatccacacttaaacttccctgtagtcttttgttgcagtgacttacaaagaagtcctgagtgttaacagttcgctattaatgacagtattgaagagttaatccaatgcacactggagagtcgatgcatgttttgcaattctctggttgcagacatatgagaagagagcaattaatacttttttgtcttctgtgatgccagaagagcagtatataccagaagagaattggctacatgatcgatcgacttacttctcctctgcaccatttgtctttaggtagaaacacaacaggctggagagatgcctcagggccatgagtggtgcacagagaaaatgaggactcaaattattattttgttgtggttggttgtttttaataaaaacaaattggcgtggtaattcagctcaggagattttgatttttgaaaatctattctcatttgattttagcaaggtgaatggtaggtagcatgtggctttatttatttaacttcaatggaaaaggcaagttgttctttcacgagtatatgattgactatgctgcttatgatatctttagaagtcatttacttgtctttacactgatgtgttataattattcatcaacaattcttcatgtatcactgtcactgtaaaatctacagactctgtgcttggtaggtcagtatttgctatgctatgatatctatagctcattagagtccttacatgtatagtcctgtgcatgtctttagttaaggcctgactgatttttgaatcaaatttctctgttttccaagaaatgtgcaaacatgtatgaagctcaaagatgtatgatgcctgaagagttcctagataccaatgccaagggatctcatgtgtaattctccagcttagctggggaattttgtattgctcatgtaggacccaaatatttgcacataataacatcaagcaacagaaatatagccatgactattatatccactccgattgtttttactgtatcaactccattactaatggctgtaatggtctgtgataagacctagacaaaaaaaaaaaaaaaaaaaaaaaaaaaaaggtcaaaattatgccagattccatttcatttcagtaaacatctggtttaacagttttgttttgtgcttttgttgttgttattaaactgtgacttgatactgcatgatgcaatgacattcataggccagtgaaagtcttgcttgagttaagactggttttgtctttcaaatttattcttagttttgtttaatattgtcatctcaggggacaatctaataataagcactttcaaacatttatgcatttctcatttcttagcaagtgtaggtataaactttctttaagaaaagctcaagtatgaaggccactatatagatatgccatgcatatttattcattgcacaaatgggttttagttacaaaatattaaagccctgagttgcattaaatattgaacttgccatcctcatcacatatcaaaaaacaacaattatatctttcaaaccttgatgaaaatatctattttacagagcaatatacacaggtattatcttactgtgaactttggtgaaatgcattattcatttggtgattgacataagtctggctgggagccatttagctagcaaatcaggaatttttttattctttcattggnnnnnnnnnnnnnnnnnnnnnnnnnnnnnnnnnnnnnnnnnnnnnnnnnnnnnnnnnnnnnnnnnnnnnnnnnnnnnnnnnnnnnnnncccccactcactcccctacccacccactcccactccttggcccaggcgttcctctgtactgaggcatataaagtttgcaagaccaaggggtgctacttttaaaacagtgaagaagacagaacatttacttacttggctggatagtcataatattaatagataacaaaatatattcattaatataaaaaatattcacaagggttatataatgagtatggtaaggctaaaaacagtcagaatttaaagctataaaagaatataaatgggtttatttatttattttatcagggtattttacaactttatggattcattattttaatcaatagtgactatgatgtttttgaaagataatgtagcaatgataacaaatattttaaatacttctaatccctcaatttacaggcaccaccttttaaaaattaatttaatttatttatttacattccaaacgttgcccccattccaggcccaggtgtctccatgagttcttagccccataccccctgcccctttgcttctgagagtacttccccatcctcccactctcactttacccctttccctggggaatcaggttgctaaaggattaggcacttcctctatgagacagacaaggcagttcctctgctacatatgtaccaggggccacagatcaggccatgtgtatttgcatatgtctcaatcagctgctggtagagcctctcagaagataaacatgataggctccagtctgcaagcaaaaagtagcatcagtaatagcgtcaggatttggtgcctaagcatgggatgggtcccaaggtcattggtcagcctttccttcaattgctactccatttttgtctctgcatttccttttagacaggatcaattctgggtcaaatattttgatggtgggtgggtggctccatgtctcaaatgggggccatatgtctactggaggtggtctctttagtttctacctcccactgttggtcatttcaactaaggtcttccaccacattgagtcctaggaatatctcacatcccaaatctctgggactttctaaaaggttccccccccccacacacacacacccctctgggcttctctcctgtcccacctccaaaagctgattcttcaccctttccccacctattctcctaccctcccactcccctccccccaaagctgatctttcccccttccccctcttgtttccctcttctcctcatttcccttcttccctctgcatcctatgttcctctttctccacatcctctcctgccccttccacatctgctatcacttgagttttttatcttacccattctgattagtgtaaagtggaatctcagggtcatttttgatttgcatttccctgatgactaaagatgttgagcatttcttggccattagagatccctctgttgagaattctgtgttcatttctgtaccccatttttaattgggttattcagtttttggagtctaacttcttgagttctttgtatattttggatattaattctcaatcatatgtagggttagtgaaaaccttttcccaacctgtaggttgtcattttatcttattgagagcatcctttgccttgcagaggcttttcagtttcatggggatgaaggtatcaccttcttttacattttattaagtttaatatcacatttttgtgtttgtttttgatttctaagtaacatactatgtcctaattttgtgttatttttttatagaatttttaatgactattcatttacataaccaaactattcattcgtaagacacacttcaaactatagtttacaacttaacagttactaagaaaaaccctaaaatttcttttggataaaaacaaggttttagctgggcaatggtggcacatgcctttaattccagcatctgtgacacagaggcaggaagatttctgagcttgaggccagcttggtctacagaatgagttccaggacagccaaggctacacagagaaaccctgtctcaaaaaatcaaaatcaaaataataataataataataataaagataatgataatagtaataataataaagttttgttagtatagatgctatttgctattaactcttataattactttatcaaaataatgtgttggtgacatgtattctagaacataatgaaatattgaacatatattcaaagaaggatgaatagatttctgaaaaaaatattattgaaacaaaacatgaaatagttaatgtaaacaatgctacattgtgcctatgctccccgtactactggcagttcctctacacacattgactaactgctctgtgtatattttcttacatatttgtacaaacaatgtaatttattaaaaaattctatgcacatatgcatcattatctaaacttatagataaaagatctgttaattagcactctgaaattgcaagttgagtagaccgtttcttctcttcctttcatgtttgaagtagggtaagtgcatcttgtctgttcacatttttgcttactgtgtatttcctagaaacttgagacaaaacccaaagttcatgccacccaagtgacagtgtttcctactgacacaaagtagagatcagaagccaatgaggaggagaaaccagagctcctggttgctgcttcatttccttcattgtaatagttttttagttctttttgaacatattctcaaacttatttgtttgacagttttgcacagtgtattttgattatgttcacccaactcttccaccaaaattgtgtcttttatttctccatcaaggccaatatttttctacttaaatattctttgatttgtggaaggcctagtatctggtcttataaggggctaaacttttgaagaatattaatccttcatctaccagcagctaacacttgccaacagttccttggatgagcatagaacctttgcccaactcggctttgcatgctgcgattttgtatggcttcaactaaggtagagcctgtgcatgtagtcactactattttgagatcatatctgcaatttccctgctattttaataatccactctttccttatagttctctctctctctctctctctctctctgtctctctctctctctctctctctctctctctctctctgtctctctctctctctctccccctcacacacacacacacacacacacacacacacacacacacacacacacatacacatacacatatgtatacttccataatgatctctgagcatttgtaggcagtggtatggtgtatatgttcttttaaagaactctcattatgccaattctttttctctataccttggtgaattgtacattgactacaaacagaagcttatctgacaagaactgagggatggtttcatctatgaatattgtaagttattattaagtagtttaccactatgggcatttagtacagtaatagaagtaggtgctgtcctatggtatatagtttgtctaatcccaaattctttgtctgataatggtgccaggcatggtttcatcttgtagagtgcttcttaagtccaattagaaagtggttatttacttccaagatggtcctgttcctattgtactggtgagtttgtattaccaagccagttataattgtagctcacagagttcatagctgataaagaccgatgtttacttttctcccctggtagcatacacctgtccgtacaataaaagcgaacctttaggatgaggtttccacatcagcaccaggtggattttttcatgttcaatgactgaagtacatggcatcttcaacaatgtggtcaaaaatagtgtaacctcttcaggtctttgggatcttactggcaagaaaatccaaaaaagaaagctgtttcaaagaccagcaattttatttgatagtctctggtccctagtgggggcattggtgccccactgtggtataattcaattctaacttttaaacacacacacacacacacacacacacacacacacacacatcttttaacttatatataacatatatatcatatatatatataacttttaacatgtgtgtgtgtgtgtgtgtgtatgacttcctcaaaattatatattcctgcttttctttcctaccctcctttccctgagcaccccaattttcccttcttgttacataatacagtttaatcatttatactagtgcattttgtctggtctcctttgaaaggttcttcttatgcctggttagttgcatcctgataaatatttaatttaaaatatactacattttaaacttaagatgaaacttgagaatgaaaatatataaaaataagtgacaatatgtgacttttgcctgtgcctgcctgggttaccatgctaagaatgatggtttccaattccatcaacttgcctattaacttcaatttttagttgtgtaatattccattgtgaaaagatgccatgcattcgacatccactcatcagttcaggggtgtctagactgccatgatttcctggagttttccagagtagggctgacatggtagcatcagtctttgtggtagaatatagggtgttttcaatatgtgctcaagaatggtggaagtcaatgttgtggtagactgtcagtcttccgagaaacttccactggtttctataggggttctataggttttcattcctactaggaataaataaatatttccctttcgtcacacccatgctagcaactcgctggcttgttgtttattgggttttatttggttttgcttggattattattatttttaatcccagacattctaataaaatcttcagatagttgtaatttgatgataactaaggatataaaatgaaaaaaaatatgtttctcggagatctgcaattcatcttttgagatctctttatgtaacatgccccattttaaattgaattgctcattttcttgatgtttaattttttgagttgtttgtatattctagatagcaactttctctcagatgtatatctgctaaatagttttttccattctttggggtgctaattaactgaagtgatagtctcctttgttgtatgaaaatgtcttagtatcatgaggtctatttatttttgatgctaatgcctgtgacattgggttttatataggaagtttttctacacaaatcaatttaaccatatatctattttctcttctaccagattcagggaattgggcctcaggttgaggtcctcaatgtatttgaaattaagttttaagcttagtgaaatatatgcccccaaatttgtctttttatatttagctatctagtttgaccatcaccatttgcagaagatactgtcttttctccagtgtgaatagttggcttctttgtcaaaaatcaggttggtataagaatgtggatttatattttgttaaccaattttaacctgatagttaatgagtctatttttatgccagtgtaatgctgttttattattattattattattattattattgttgttgttgttattattatagctctatactctatatactctaactctctaacttgcgatctggagtgttaataccttcagttttgatgttattgttttgagtattctagatcttttgtattaccctatgaaatttaagatttttttttcaaattgctgtgaagaactgtattatgttttgttgtggattgcactaaatctgtagtatgcatttgctagtatggacattttcacactattattccttacaatcaataagcagagacagtgttccaatcttctggtgtctccttcaatttcttttgttcgtgtcttatgttgtcattgtacaactctttcacttccttgattaaagtcattccatgataatttacgaggctattgttagtggagttgattcctgccatcagaatattaagtaaaataaaataaacaaatgttttcagcaaagttcttaagtaggaaagacatttcattaatgaatagactttctgtgtttgaatgaattaaattatttagagatagaagtacccatctttagttaccttggctaattccatctcttatttgttgaataaagtaagtaaggattgaagagatgatgtggtttggacaagtgataactaggagaatgactcttggtttctaacttctattctttccattactccaatggagctactgcctttgtttatcttcaactcaaacgttaatttgcttcggttttatatgatgcagctttactcaccagagtgacaaaatgcctgacagaagcaactgaggaaatgatggatttatattatcttacaatttcaagaaatcctagttgaccatgacagtaatgataggacagtaatgataggacttccttccaagaaggaaggagcactggcaatcttctcacattacaagtgctcctgaggcagaggacattgcctggaaccagaaatgggtagcatctacaagactcacacaaaatctcttagttcttattttaattaagaaaggcaagtttctcttgtcaattccacccacctatgtgactctgtaggccactatcccaaaacctcccaaaccttctcaaatagtgacagcagctgaagatgaagtatgtaaacacataaatttgtagtgatatttcctattcaaaccataattcttattaagagaagtatttgattattttatttctttaaatgtattaaagatagaaagattcttgtgaaaaaaaaagtttcatttttcatgacataaaagattttgacagctataaaacctagcataaaatgctgacacaaaaggatcaaaatcaaattaagagatagaaactcaggatcctgcaatataaaattatataaataatacacagcaaacttgaatttgatagaaaaaacttgccacagcctgattctcctgtttagtgtttattctggtcacaaataacttatccttaggaaaaaaaagaaagcccagtattcccttaactaattacattttataatgctgccaaagcttttgatataaacattaaatatttatcatagtgtgtacaatatgataaaggagagaagaaaaagagactaggaaaaatgagggaaggagtggggattggagaggtttaaatttgggatgagagcaaggagccaggaatagaggagaggaagggacagacaggagttggagtactaataatgaaggtaactagatagatgtatgggaagctagcattcatttctcattcagttccttatagcaaacactccacaggatagtaagtgataaggaaactcttgagtgttttctagctttgaatttagtagctttctttttttcatgtacagtctgcctttatccacttgattgggatgtatgtattttgagtaataaagacaattcccatttcaatagttaagcattgatttaaactgagagccaggaaactttttctataatgactcagaatataaataagtaggatgtcttttgttcctgtggttgtctatttacatcactttggtctcctgttgttgggataacccagctactgagatatataagtaaatcgctgtcggtatgaaaagaaactataataatttgaattaaatttggagcaattttatatgccagacaatattctggataatttttcaactattaaaattgacagtaaaccatttcacctcccttctgtatgaaagtagacaggttataccacaggtcctagttcaccgacttcctcaaacctgaggagcttatcctgaggtctttgttttatgtgcctttggtaactgtaacaaaagaaggggacacacttatgaatgagtaagattctaagaaactgtcatgctcaattcatctcctgtataacaggaaaaagtggaggaaataagattctttgtgtccctctcaagcattctttgaccttgatctttctgaaatagtgctccatttataatttctattgtctagcttgaggccatcattactttaagataatctatcattgtacaacaactctttagaattcatcactttatgcctttggaatatttttcctgtgtcttgtttagacatgaacaagcattgtggtgtgtgacagaaaaactggagattgtgatttttaaaaagtccttattttcacaaatatactcatataaacattttagttaaagttgtttagcagaaaaataattcagattatgttttattttaagtgtttttgtgttgcttttcatatagttcaacctatgtatgaagataaacatctgaatatttggaaacatatggaaggaaaagcaattccctttatatccagatgtttaatgttattcaaattcgtgacataaagaaaaagaatatgctgaggcagctgtgtttaaggtttactaatttttttgatagttcataaaataaaaaacttaaaaattaacaaaaattatccagtcatttaaattcaagggtatgctatagttatgaatgcctatgtatttttagaataaaatatctgtgtttttaatgaaaacagatgcctaattttaaagtcctttaattacttacataatgacacactttgactttgacctggctgtttcttatgcttacatttttatatgtattttgaatgtattaattgtgcccaataaaaccacgtggaaaccgtgagttcacagaatcgtatttttgatctgataaccattatgaacatcccaaccctcttctcctcacattcatcccatagattttggttcaaagaaatttaatcttagacctctgatgaagttctaaggtgatattatccattctatgatgagttccacattagagaaataattgtgcatggccagagaaacgtgccccttactgtcagtcattctattctgcttcctggtaaccaatctatccatttatcccatcttcagaagcccaagtgaaggcatacatatgcttaatcgctgtttcttatttaatagcttatggatgactcttctttcatcgtcttgcagttattatttgagtatggtttattacagacgtgctatccttaccaatgaataaaatgccacaagaaaggcatagctatcaaaatagcattagtactccaaggactaatggccagtccaggcaatgatcccaatgcgcaaagaagcattaggtcacgtggtactcaaggcaggtagggagaaagagaatgaccaatcagaagcacaggaaggttaggatcctattctcttcttaaagaagagtggaatgtgtcttgaacataaatgcttaaaatttaataacttgacaacttcttaaatgattttatgttaaagcaacagatatgacttttatgtagcgataaatgtggcatcactatcaaagccaaagccagggttgctgacaattaaaattaggggtggcaggctcagattccttactttggatgcaaaggtattagaatctttgtatcagattgctatccttgcttgtgagcctcctcacatttcattcaaataaaacgacaagtaacaagtaacagtgaccttgtcaagttttgatggaatgcagagtggccacacaatcatcttgtgaacatttcatttcttttttagttggcagggaacaaactgaaaacattcaattttgcatctccaaatgctgttactccatagcataattctatattggcatgattaggaaaaagtgaagaaaggcttattttcaagaaacagtagggggttgtctctaaataaacatacagcatcttgataattttcttgaaacaaaagcaagaagttagatttctgaagttggcatctgctttctaaatgtgtatacgttttggacagaaaatacagctacagcattctgatacccatgacctgtgacctatgatacataagatcaactatatcactttgtaaatagaaaactcactttccctcattgatttagaagtaccatcagattataagtaacagaaagccttttttgtgatggcagagaacaagaacacaaagtatggatgaaatcaacttttgcttttctaagcatgcccatttacgtaaccagactttgtgtaaacacagatcactaactaaaaattccagtttaccataagtgatgtttttactttacctaaaactcctagtccagatgattctttaagtcttcagtcattttaccttacatatgcataggcatcagaatagtgatgaaatattcagttgctcacattgtccaaatctgttaacctctaaaaacatatagcttcttttgtaagaccagttagcaaaattgacaagttgcgaagtccctgatgaggtacttccttaaatctaatggagagctatatctaaatattagagtaattacttggtactggatctgatcagaaagctaacaaggaacatgggaaaactgaccatttaacacaaagttttagagtcttgcaggaacatgcatttaatgtcagtgaatctcttgagaatatgcctttaatgtagttggtgtggcatttgagttggatagaatttaaatggcttctccacgttgcttaaaaatattctctctatatttgtcctcagctaattttaaaacaggttccaagaaaactcattatatctttttatcaagtattttatttcttacatcccataaagctaatgtaattagaaactgctgtctatcatttgcagtgtcactcagaaatatttttctacctaaaccccataaatattgtcctactttctgtgtctcattggcataaaccaaactttgaggacctctgtaggaaatactgactaatgagcagatagtttgtgttcctcgctgtctttttctgccaattttatttccttttaaaaataaattagttgtctttttatatgtttgtttattcgtttattcacttatttattcgagtacaagtattttttctgaatgtatgtatgtgcaccatatgcatgactggtatttctgagtcagtagagggtattggattccctaagaattaccaatggttctgagctaccatatggatactgagactcatatttggatcctctgcaagtgttcaagcccctcgtgccagttataatcagttacctattatgctgtgtttctctcttccttgtagcctaccttaattcaatattttgtgttaactggttggactcaacaccattgtaacgtttttctctgtggagtgctttcaaagccctaagtaattcaattcaaaatgtaccaggaaaatacaacaaatacagaggattctgagagactgtaaccttcacgtatacacatttctgtgtaactgctggctttatagtggttagtatttattctggtcactttccaataaattgaaatgagtttgaattaaagtagcaggctgcaacagtcagagacagcccccactccaattgttaggggacccacctaaagacctagctgtacatctgctacaaaggtgtagtgggcataagtccagcctgtgcatgctcttcggttgattggtctctttgatgtcccatgatgctaggttagtttactgtatagaacttgtggtgattttggatcttccagctctgttaatacttccccctactcttccacaagatcctctgagctctgcatattgtttggctaaaggtcaaaggtcactacatttgattccatcaactgctggatgaagccttacagaagacaattatactaggctcttggctaaaagcatctcatagtagtatgataaaaactgtcaggggttgactctcttttgtattatgagttttaagttgggccagtcatttgttggtcattccctcgatctctgctccattttatcactatatttcttgcaagcggaacaaactttaagtagaaggttttgtggatagattggtgtcctttgttgcttgcctttggatccctttcccatagctagacttcctttgtctggacgcaatgggagaggatgcacttagtcctgctgtgtcttaatgtacgagggtgaattaatatacatggggagtctcctttctctgagaaaaagtggattgagcaatgaggaaatggttgtgatggtgggattgggaggagaggaggaagtgaggctgcaatcagactttaaagtgaataaataaattaattaatgagggaaaatgaggagaaaaagaaaaataaagtaacagactgattttctgtagcacttcttcaaatgtgttggtcatgttgttctcttgagtagattaaaaatctgttttctctaattgcttgtttatatattttataacaataacactaatttatacctaatcttatcttaacctctaacattattattattattattattagtagtagtagtagtagtagtagtagtagtagtagtggtagtagtagtagttgtagtagtaatagtagtagtatttgttgagattagaatgttattactatatttatccattccattttctccctccaaagccacccacaggccccacatgttctccttcaactccatgacacattgttttttactagttgtagttttggtcatatgtgtatacttatatacgtacatactccccaatataacatttgattatgtgcattgctacttggttacatgtatgcatggttttagggctgccaatcactatgctctttccttgggaagagcatctctgctgtccccagctttctttagttgcctctatctccctgttcaggattgaagcctcctgggcttttccccatccagtttagcatgtacactggtggcattcctgttcagctgctgctcgagcagttctatttccaagacgttatagacataaacttctgacatagtgtatatctcacatatttcaaagatgtttgaaaggagtaatttcagttacagcaaaaaaataatttaccaatttgaggtgaattgtttttaataaaacttaagatcccaaatgttttattaatattacatttgggggtgaaggatcattttcagtagctggtaacaactagaggcagaaacacaaggaaatctttcaagtacactgtaaaaaatgttggagattttccaagatctcttgagcccattcaaaaccctgcaatgcaccaggcgttgcccctttccatttacagtgaagagtttccatgcagacacagagatgccttaggggtctttagataaacaagtcagacaaaatatatagaaacccatgtagacctcagtgaggaccaaggagttgacttctcatatgtagacaaaagaggctcatattagaatgaagaaaaattgtgaagtttataagtgtccaataggaggtatcagcagagtctgggtttagttgaacaagttacccaacgagatgtagggcgaacactgtgagattcttcttctaacctgatgtagttaattttatgctcctttaaccctgttacagaattacatttataatagtttcaaatctcgcagaaaccctgtcataaaattcactatctgttccatttggggacgaccagaattaataccttagtgacatctgttttttttttttatgaagcatggaggagggaaggataaaaagggtgaaatttcacatagcctctgaatttgaagtgagtgagggcaatacatatcaatgtaagaacataaagcccggactcctgcaaatgcagactagcagtatttacatagaattgtggttcgggagctaaaaagagtgggtaaaacatagcttgaacatttatgtcagctataccatatgccatgaaaaacatgtattagctcaggagggagggcagggtctctgcctgtgcctgaatcctagagctcctttttagcagaatgagctaaagggtatcattaacttttatacaatacttcacacagctaaatccaggtatgaattgatatttaaattaaactggaccctacaaaaattgtgacattcgtgtgtgttttaaattgaaattgtaattttgtaaagttcaatgtgatattatttgaaaatccagggagagtttaattatcattccaacagaagtataaatcgaatactgaaaataccataaagactcatttaatataactctgagatatttgtcaaatgatttaacactattttacctaccaatacaaatttcttccaggtgagaatttttttagggctattataggtgctgcttttgggggacatgagctaaggtggcaaaggagagaagcattattattagagaaaatactttggattcatatcagcaggtgcaactctggcttgagtcagtgctttaaagtcagtgttaagctctacatcatttatctggtttctaattgttcatgatcaaaataaacctgaggaagcacctagagtagggtggaactaaatccagctctgcagcgtgattaagatggcagtcatatcaaccttctcgtgtggtgaaatatcactagactttatgtgcactcatgtgcataggcatacatgtattcacagaggagaatatgtggaaagctggtcaggtctaaatacagtttgtagctgatgatattgtgaaaatagcagcgtgtgatttagctaatgttttattttggtaatgctggttagctaaactttagtgctgggggaagacacgggcttatcattacatacaaggtttaaatataaacttaacgggactacagtcccactcatggatattttctctaaggacgtgacatttatacttacccagagaatgtatgaaggtggccataggcattctaataataatcatctcaatgtagaagccatcactctccatactcactagcaaatgagtgcacactgcgcctcatccaaaagattccttagcaatccaagaacaaactactggtgtaagctgaaaaaaacaaaagacgcaaaaccttagaatacataaaagaacaaaatggaaccacatgaggttattgctatcactcagcagataaaccatccctagacccagaagtgacgcttcaggcttcagcagtgccaactattattttttggtctaaaatactctgtttatatttctcaatgaaaatttagatttcaatttttttcaatcttatacactagaatgtatcatgtgtgtttcatgaatttattatgttgtcatgatcatgcgcagtgcatatgtgcatttatatactaaggatacacaggcacttaaattcagtcttggaggcaagatgggttctctatatctgtgtatgaccatttttaggttaaaagtattttttcaaggctttcttgtttttaaatatatgtttaaaattttctgtctcattaagatgcagtgaaattagagttattgtgtgacttgcgtcagaattgtgtgtgtgtgtgtgtgtgtgtgtgtgtgtgtgtgtgtaagggtatgtgagtgaagatacaggcactggtaatagtcaccatatgtgctgaccatgcaaagtcaacttttatgatagatttgttatattttcagaacatgctttgaatcatttataagtctgtgtaataacaagttatatcataacaggatttactggctttttattgccagctacacagccagccagccagcatttacctatcaatctgtcttgggtatgaagtgttgggctaataaaaggaggctgtgcgttatctgattctgtagtctgcagtaaaccatgcctgggtccaagtactgccactgtccccagattaacatgtgtgaaagattcagctttcctgatcctctgtttcactacccatttgaaattagtacagtcctaattgctaaccatggagacttaaagtcagcgcagcatgctgtaacatccatcaggtggttgggaagtgttagctacttactaccatggctactacatgtcctcccgttctttggagtaacatttgacattgatttttttttttaagttgcatggtatataacagcctcttttcactgaaactcttgaaagcatcaccccatcaggcactttctaaatactctggtcaaggttatgattcccattcaatagggagtctctctaaagcaattaaaggttcttgactgatccagggaagaaagaaatggacatttattttctgactttgtgctaaaaaaatagaatacaacaaacaaaaatgtcatttagcacagaagacaggaaaggggtggaacaagttggtgaaacaaagatctcataagattgacactaactatttacattttacattaattttcaatggttcccaaggaaacattgtctttgaaaggataatggtagtatctattacctacaagtattgtttaatatatagagctgaaatgtagtctctctctctccctctctctgtctctctctctctctctctctctctctctctcgtgtctctgtgtgtgtgtgtgtgtgtgtgtgtgtgtgtgtgtgtgtgtgtgtgtgttgcattacatagaaatgtacctatgcatacatacaggctcaattaagttacagaacaattttagtgtctaaaatatgaacattgtgaattcaaaggaagaaaatacacttgaaaagttatgttagactagaagttaaaatacttacaactttaagatcttagaaagagcaaactaaactcatttcagaacccaactgcttccattttctgacactctttcctttaaagaaaacacatattctcttgctcagttgagcttatgatagtttgactgtaagcagtatacacagggcattattaacctgatttttacttttattgtgcacattaacattttaaagaataaagagaactctgcagagttagtgcaccctggatgctctgactgatactttgaggctcagtcttgacaaatgctgtctattgagttatctgctgtggcgggctgatggcttataaacataaacacaatgacatttcaatcaaaactcccattggtctgctaaaaaggggtcaggtgtttttgcagttcctggaagccttttgatactggaaaacaagttggttcacatttttatatagttggttagtttagagtttatgtgtatgtgtttctcttttgtctataaacttattgcttcaataagtcttaaatagaccatctttttggtatattttggaagagactttcttttaaactgacttccttccagtaagtgattcacggctttattaattaatgatcttgctgtaatcacaaaggtttggaaatgctgaaaattaaggtagttctgttagtacagttttacattttagccaacatttctgtccttgcaatatgtagggcagaaataaaaacttgagcacaagtagccattggctcatttttcctaacatttatgacttactaattaacaaatattggctattgatgcttcatacatgtatgtatttcattattattattcctctcacctagtgtttattttcttcccactcctgccaacagtttgtccctacaaatctcatcctatattcatgaatttttattgtctgtgtcccttatagctgaactaggacatatgtttgtctatagctttggaaacatccattagagcaaggtgggattgccattgaactacaatgaaactacatttctcaaatctttgacttgttagtgtgtgtactggctagttttgtgtcaacttgacacagctggagttatcacagagaaaggaacttcagttgaggaaatgcctccatgagatacaactgtaagcatttcctcaattagtgatcaagggggaaaggctccttgtgggtgggaccatctctgggctggtagtcttgggttctataagagagcaggctgagcaagccaggggaagcaagccagtaaagaatatccctccatggcctctacatcagctcctgcttcctgacctgcttgagttccagtcctgacttcctttggtgatgaacagcactatggaagtgtaagctgattaaaccctttcctccccaacttgcttcttggtcacgatgtttgtgcaggaatagaaaccctgactaagacagtgtgtcagcaataagtggtgacctctgagctccttctctatccatagctgattgctgggtgtgccttccttgagtaggccattgtacagccaaagtgagtccacactgagtctacattgtacttagaagacaccctttatagcttgcctccttatcttcttgctcttaagttctttctacctgtatttttttcattgttccctgaattttaagaagtagagtaaatgtcttctttaggatgggggccctcaactctcccttattatcagcatcttgtgaggccatgggtttcagcacaaagagatgcttctctaattaaagctatagataatatttgtctggttagtataactgtagatagatggatagagatagatagatagatagatagatagatacagagatagatagatagatagatagatagatacatagatagatagatagatagatagatagatgatagatagatagatagatagatagatagatagatagatagatagatgatagatagataaagtaggtagacagagattcagatttagagatttagaaagtagtgtattagtgctgtatccatttaaaagtatgagtaaaaaataatccccttaacacttccatattcataggggttatcatatctcaaaagccaaaatctctcgtggtataccatcagaattcactcaggacttgtatttttatttagtgagttgtctcagtcagggtttctattcctgcacaaacatcatgaccaagaagcaagttggggaggaaagggtttattcagcttacacttccatgctgctgttcatcaccaaaggaagtcaggactggaactcaagcaggtcagggagcaggagctgatgcagaggccatggagggatgttctttactggcttgcctcccctggcttgctcagcctgctctcttatagaacccaagactaccagcccagaaatggacccacccacaaggggcctttcccccttgatcactaattgagaaaatgccttacagttggatctcatggagacatttcctcaactgaagctcctttctctgtgatagccccagctgtgtcaagttgacacaaaactagccagtacaattgaccccttgtcaacttgacacacaaacacatcactagtaagcctcaacccttacattcttattcatccccaagatctaaataactttaaaagtcccacagtctttacatattcttaannnnnnnnnnnnnnnnnnnnagtctacattgtacttagaagacaccctttatagcttgcctccttatcttcttgctcttaagttctttctacctgtatttttttcattgttccctgaattttaagaagtagagtaaatgtcttctttaggatgggggccctcaactctcccttattatcagcatcttgtgaggccatgggtttcagcacaaagagatgcttctctaattaaagctatagataatatttgtctggttagtataactgtagatagatggatagagatagatagatagatagatagatagatagatagatagatagatagatagatagatacagagatagatagatagatagatacagagatagatagatagatagatagatagatagatagatacagagatacagagatagatagatagatagatagatagatagatagatagatagatagatagatagatagatagatagatgatagatagataaagtagatagacagagattcagatttagagatttagaaagtagtgtattagtgctgtatccatttaaaagtatgagtaaaaaataatccccttaacacttccatattcataggggttatcatatctcaaaagccaaaatctctcgtggtataccatcagaattcactcaggacttgtatttttatttagtgagtcattacttccagacctggaattatttaattctggggtatcttccttttaaaatctttttatatttttttccatttttattaggtatttagctcatttacatttccaatgctataccaaaaagtcccccatacccacccacccccactcccctacccacccactccccctttttggccctggcgttcccctgtactggggcatataaagtttgcgtgtccaatgggcctctctttccagtgatggttccaagagagcaggttttcacattttcataacccaagtcatgttgcatgttcccctacattccttcgtatgggtcatgattatttcataaaatatatttttctgagacaagatcatgcttggcaagaatctttgaaaaatcacactcccaacaatcctcctgtctcaggtttcccagtacattgattattgctgtgcaaaccacatctgctgaatataatttttaagaagatatttttgaaaaacaatgtattggatttttattttgtaaactcaagttcatttgatgtcatagtttattcaatttgtatttgaaaatagtttttctttcagttgatgtgtaatgcaagacaattttaactctccttggggatgtatttggagccagaagttaagaaaattgtacaattaaaaaaatgtagctctttcttttgtaattcagatgaccttttaaccttgttctggtgtcatggtatcattgttatttttaggtggtcatgggttttacttcttgtaaaataaaattatatatatatatatatatatatatatatatatatatatatatatgtgtgtgtgtgtgtgtgtgtgtgtgtgtgtgtgtgtttgtgtgtgtgtatgtatatatatatatatatatatatatatatgtgtgtgtgtgtgtgtatatatatatgtgtgtgtgtgtgtgtnnnnnnnnnnnnnnnnnnnngaagataacaatctagagctctgatagaatcatgatacatctccaactcctgtgtgtagtatcttattgaaaaatatttagaaagaagagtctgagaaagagagagaaggtacatttatccatatcagaggttcagtagttgctgttggcaaaggaatcacagagacaaaattattcatccatcgcttgattctttcattgctcctagctacctgcttttacaatcattcctactttccatctcattacccagaattctttctagatctctttgataaaatatattgagatcacctaaactttcccttaagctcactcatgaaaacaatgtgtacctgttcattggtattccatcacaaaggagcagtattcgctggactttggatgaatttccaatttgtacgtcttgttggtgagaggatcctattttcttatcagccccgagctccccatcacttcctcatctttgtggtgaagagcacaaaacacttcgaaggtatcatgtggtgggagagggtggcatgatgttaattaccagacccaatcctaggactgtttcaagccttagaaaaaattccataatgattgtcattggttcagttacaggccttctctcattcaaaatatgagttattcctttctttcaatatatatatatatatatatatatatatatatatatatatatatatatatatacacacatatacatggcaatattcacggatacatgaaattttggcagcaaatcatttgttgaaaagcacagaatttcctgagtgataagtctagtgacaatataaaaatccacttagctcttgtatattacataaattatagtatgattaaggaaaataacacagagcatttaacgaggctttaatatttttagcaccataagatgataattttgaacatcagaaggcagagtaaatctgtcctatggagaaaaaatctacaggataatttggactttgtaagtcatcacaatctaaatagccaaagagtgtttactaacaataaataaagatatatttaaaaatagaagaattgggcaacctggttatgaccatttcctataacagcaggaattcagggaacttgtacatacatgatcacagaggaaagaaagagcagggggaagaattattactcataagttttctatctacctgccacatttttttttaacctctcagaatttctgactgcttcactgagattgcaagacagttttggcctgtctttacctaatttctgaggcctgggctgatgacagccaaggcatgttccctgacaaaatcctgcttgctggcaatgaagacacaggctctgggggaatcctgtgttatagtgttccaagcctgtctatagttgacagaactgcagtcaaaggtttcaactgtgctagaagcagtggacttggctttgaaggtatgctaaggggtgggcccctgctaagagacgctgacaacacatttgctacctctgagtgtcactatggatacaagaccacagtgcacatttaaaaaggtcaaggggagaacaagctgtcttcttgggagtgatgtgtggtgggagtgggggtccttacattaggaataattgaatgtggacaataatctttattccccaagggtacattttaataatgcaagtgactgatccacttaatgtctgtctgattcaaactgcatggtctggtttttcattaataatgaacccacaggtaaacaaaagcttcacattaaatgcctcttaaaagtgtttagtgtctactgccagaaaacctattaagcacagttgtctaggaaaaggctgaactgagtagaagctgtgagttccacagtggaaactccatttctctgctgtctcgttaaggaaaagttcacacattcccatattggaacattgagaagcatttcacacagtgtcttaatctttcagcaataatgtttcaaaggaagcataataaatagtgtattaataatagaataatccatcataaatgaataattaacattcttaatgagtttaatgaaaatggtggtgggtgggtagacaagatgtctaatctttcgctttaccctgtaagatacctgaattagtccattactgaagttacttctccttgtaaatacaatgggctatggcaatatatcttcaaagattattttttaaatcacagtaattattgtcatacattttaattttgttcttaccaccaatataatatggagctttattcagtgatgtaaaagtattctaaacttagaagctaaatctaggtttttgcagaatttcatttactttgttttcaattttgtatatatttttgtttccaaaggttgaagctcttatgggatcaccctacctaaatttatgtttaatttggttgacttgacacagtgattcttgagtatctaggaggagggatttttttttttaaattagacaatggcatcaagatttgcttgtatatttcttcccctctttaaatggacacagaattaaataatagaacaaagtgaattgttagagattgagtttctaccagaaatttctatttttccaaattcgaggtccaggccatcccttccagatcacgaatgtcccacagggatttcttcactctcagccctgagaatatcctgtactaagaatcaccttcactgtacacaaaccaagatgaatggctgctctcctgcatgcttcttcatcctctggatattctccttctcttattcatttctaagtagtttgtcttagtgtggcatcaaaacaataatctacacttaggcctaggaggcacctttaccatcaactctacctcattcattctgcattctccatattgtctcatttagtctttgcttacttaatgactacattgattaaaggtctgcaatttttaatatgattttttataaattctttcacggaaatgacatttctttttaaagtctactaaatccatgcatcctcgtttgctgccctggtactttctacttcttttaactgatgactcttttgccaatttataggaataagtaagtgagtgtggaagctcaaagccgtgagggtgagtgtgcataaaataaatgtgcacatttcagcattgggaaacacaaaatttgatatgagagaattcataacagctgtgagaattcttaggcactctcaatattagcaatatttctttccggcaacacattctttttttcttaaggccgttgaagcataatattataacctttttcataaagctgttaggtagagctatggagttgtcctttcaaaccaaatggagaggaatccaggatttggaaagtgaattataaaaatggacttatttaagtgtaagaaaaaattgcactaaaataaatttaatctgccgagtcagtgcaatcatagatttaatgtagtttgaaagtataaaacctttatagttttaagccatgagcagaaaggaaggaaagaattcttctaaataactgtgctactttgttctgcagtagaagatgtataagctttgtagtcattatttgattagattttggtgggttttgatgttgttatttctttaatatatccgagggtgacaaagaaaataaaatgactgagatggcattatcttataacttttcatatttgaaaagaacaaaattgctttttacatttattcatttatgtgtttgtttgtgtttaaagaagtgtatgcatcagataaagggggttgttaccataccaactgagctaagtttgatcccatagacacacagaatagagaatgcattcacacaaatcaccatctgaccaccacagtgccactgctctgtgtatgaatctgagagaagatacattctctctctctctctctctctctctctctctcctctctctctctctctctctctcacacacacacacacacacacacacacacacacatacatgttttcagaaaggcattcacactcaaatgccttataaaatgagatagacttcacttaatacatgcatgaacttgagaaatttatttaaatctctaagttttataaaaacaacattgtcttcattgtcattacatggtcactactctcattggattattataaggattaggagacaaagttaatcgggataccagaaattaagtattccattgtccttaactcatgtttaatgacttttttggtgtctgtaagggaggtatgtatctcaaatgtattgagcctccatgttccaggaacaattgtattatagtccatttggtaaaaatagtctccatatatatcccataaaagtattctacattagtatgtaatgtagaagatttttaatgagaaaactatattactgcttttgtttactgttggtcgcctttcccttgcaaatccatgatacctctaataaaattctagaaaaataatggttatgagttcctaaaaaggaggaaggaaaatgacttgtggctaccatcatccatacatgctatctcacatgaccatcccatctgtgaaaggataacttggctgttgttactgttttgaagtgtttattcgaccaggagaccctactagtctacttggttgaatttgcttttggtctttgcctttgataaaacatatcgctaaagaaatcggatgaggttgagaagtagtatttgagagagaatgttgcaagctattaatgcaggcattatacggtttgcattcagatgagtaagttcaacaagagcttctctcacagttgcttgtcataaatgtggattttcttagtgtacattgttcattagtttaacagtattgcttttgaaaagtattcaagactttcatggactgaggttcaaaaatattaatcaataaaaatcaaggtagataaattctaaggaaaaagaaaaggtactgaaaaattccagtttacaccaataggaagttattgttgaatattgtacagagaataaatagtgaatgcatagatcaccatgatccagtaatcaagtgtgagtctgcaatccctacaggtagcattggtgcggttgaggattttctggcacagttaaggtcagatggaaatgggtaggtgtttcattctcatcttgagctctagcatatgccaagcataattataaacagagcagtaacacagttcagccaaggcagtgatgggactgccaccaactgtctagtccttactgtatacgcccacagaattactacctctggataactcattaagaaagtaacacaatgttgtccttgttcataagcgtgatgtatgtatccttcctttctgcctttcccccaccattatatttacgaggcctgtgtacattttgggtgtaattttattgcacgtctctagttgtatagtactcttttttatggatatatatgtatatgcattacagtttaccaacacacttaaattttagtctttccaatttatagccatgacaacatggttgctctgaatatttgctggcatgaatcaaaacagtattagtcaggagtatcttcaggaactatactcaggagtatttgtgtagccttgatgcagctttacatttcttatttgtagttccaagaccaagaaatgacagtttctttgccacacacccttgcaatcattggcattgtcagagattttcctctttgtcagtctattggttgggtaatgatatctcagggtaatttttaatttgcattttacaaatcactaatgagcttgggtaccttttcatatgcttatcaggcaaaagctctcaggttttagacggccttttcaaatgttatagctagctttccattggatgaacagcattctgtctttttttaattaaataaaatagcactttcgagtttctctgctaatgtttgcaaaaaggcaattcaatcagaccccaaagatgagtcgttatgttggtggttcagtagttatttttagctgtcatataattgaaaaccttgattcccttcccatttctttttctttcccagataaagtctttgacagttccttttcttctcatcttttgcaatccactttaaataaactaagcaaaggcttgtaacttagaacttaaaagattgtctaaagcagaaaagacgcaagcaggttttctctggcctttggctttaggtaataacacagaaacagaaaaaattcttcccacagattattattgtttaaaattttaatactgcagaactagacttaaaaaaaaaaagcctagaccttaaagtaatgtttgagttaatataaaagacacaagtgataggacagcgtggattattgaaactgagcaataagatgacaggtaaggagctgagaggtgatttcttctaccaatgctaaaattggctttggaatgatttatatgccgtcaactcattatgcccctgactatcaccaaggatcaccaaggcaacaagggagattcttcacacatatcctcaggcttcatctccctcttctgatgcaattttgccttaccttctaacgtgatatgtacacacagatgtcaaggtgtaggtggagcagaatgcagtaagctattgctctctacacatgtccattttgacatagctagttattagttattatagaaacaaaaaatcaagctgtttatgtgcaatgagcatcattttggcaggaccttggcaaagcttatattccttgaataacctaaattctgtcagatattcaacctcaaccttatcactgcctattcctgactgtaaacgatgttcttgcttttacccacatagattattgttcaataagatcagagaaatcttagagaaaatggcaattttatgtatattaggtcttttatcgcttcataattttttcttttcagttttggtttgtgtgcatgaatggaaattcgtctcttttaaaacacctagtgtccatggtgactaccattatttctcattttctttttattgtcctttgttcttctattttcctttaaattaagtcactgtgttttaagggctatgctactatgtctagagaaagtgcactgaaaaagtaaattactttgagagcatattgcaaacaaaattacaagagagattaggtaatttagcagctgaactgtcagtaatggaaacaaatatttatatatttcagattatgttgtaatggacaacaaaataaactcatatatttaaaaccagcagttcattttaatctttgcttatatattttttaaaaaactaataaatagagtggtagaggggtagagtagttataatcatatatatatttggtaagctgaaataaaatgttgtcttcttctacaaatatttccagttgacttctcattattttgtttggatggtaatatgttaagcctaaaaatataaaaatattacgaagaaagttcttaggagtgtggggactcacaaagtgtaatggctgaaattatcttatatgttattttccacttattattttaaatataacttaccctaaatatcataacatatcataccatagcaagtcacacagccaagcacagcagatgatattttttctttgtgcttctggaaattataaaaatagagttgtgtcctttattttgtgttttatgccatatgtgtgtttgcaatatcctagtcctttgggattaaactgaaatgaaagcacatagttttcttctgcagaaattgaataccgcattcttgggctcagtgcagcaagatgggttcatcttgtacatggatgaaccaaacatgtaacctgcctgcatctacactagcatcctatagcacaggatgattgatttagtgatagactgggattcaaatagaaccaagaaggccttgtggagctgcagaggtggctcaaaggttaagaatgagttcttttcttccagtggacctgggttcaagctctgcacccgtaacaggcagctcataacttcccggaactctaatgctcatggatcagagttcatatcctcacagatgcatatgtacaaaacactgacagaaaataagtcatagggagaggggcatgaggaaggagaggaagagggagggatgggggagggagggaaggagagagactcagaagtggggagggagagaggtttttcttgagatatctctagaaattggttttatgctgaaaatagatgtttctgacagtatgtatctctgaagagactgacagatatattggaaatttggcagttccaagggaaaggttacacacatacacaaaaggaggactgctggaaacacacacacacacacacacacacacacacacacacacacacacacacgagagagagagagagagagagagagagagagagagagagagagagagagagaataaaagtttttagttcctgaattaagtcatatcttctatagcatatacaaattacatgagctaatgaataacaagtttcattattgttttgtttgaattaattttgagtcactgagcaatagaatatttttcacattgcatatcttagtaacattacatgtgtctggaagacataagcataccttagctgtagtagtgcaataggagctacagcacccagtgtttctgtctctgccactatcatgactgcaaaactctaggttttattctcagttgtctacatacactctccttttctttcctcatttacactgaagctggtacaatagtcatccccccccctttttttttccatgttaaggagacttgaccttgtccctttgcaattgtgctgtgaacactagaactacacattttttaagttaatcgttttattcatttacatttaaatgatatcccccttcccggttacccttccacactctcctcatccaatccctcctcttttccctcccttatgtctctatgagggtgctcctccacctactttcttactcatacctcactgctttagcatcctcctatgcgggggcatcaagcctccacaggacccagggcctctactctgattgatgtcagatagggccattctctgctacaaatgtatctggagccatgaattcctccatgtacactctttggtttgtagtttagtctctgggagctctgggtggtccgtttagttgatattgttcttcctatagggctgtaattcccttcagctccttcaatcttctccctagcacttccattgtggttcttgggctcagtctgacagttggctgtaaatatctgcatctgtattggtcaattgttggtagatcctctcagggaacagccataccagactcctgtcagcaagcacttcctggcatcagcaatagtgtcagggtttggtgtctacagatgaaatggatccctaggtgaggtgatctctggatggcctttccttcagtctctgttccattttgcctctgtcttttcttagaacaggaacatttctgggttaaaaagtgttttcattaattgttgaattgaacccaacttgttaattctaaagcttctatcaactctctcactgacctgttctttctttccacagtcaagtgaagtcaccctttctgacatttagtagtattgaacaattgagccatccatgagaccattaacatatttaggtaaatatatataaaatttagtctcaacctctgaaggcactggcttctagatctgctcaacaaaaggttattgtgaggcgagggtcaaaaagagtttagcttacacattataaatactcaaatgccctacccaaagcacactattacagggaggtgtagataatctgcggaaaagttttttgagcttgtaaaaatatctgcaatataggatggttatactttttattaccacaacactgaagttgtatacactgttggcactctaaatatttatagattacatccaactgaggaatggtagcaaaattataaatgtggcacaaattcactgctgtctctgaaacaagccacctcctctttcctgacgctttccacccttagccttttgcatttcggtctcaacctttttgaatctattttatgtcctttccctttcttcttcctggatttcttcagcaaaacccgtgaacatgtcagaaggacactagtattaagaggccagtgaacctgaattatgggttgcaaattattcctgaacagtaatgatatgctcagactatctttcgaagttgcactaaaaaaacttctgacctatgaggtagatgcctttgcccagaggaagttcttctgttgccagaaagtacttactagtctgagaatggagagctaagtgatggtggccattaatgtatttaatatgcaccagagaacaatatacaaaccaaaggacttcatcccattatcttctgccacatgcagttttttatgcttccatttatagtccatcaggataatgcaatgtaaataatttcctagagaaggcaacgtctagagagctctattaattcatcataaatacacacttattatttctgaactctaaatattttaagcttaattgaaattcttcagcccaatttccctcatatcctaatctacagagttgttaaaaggttaatgaagggtgtttttactagttatccaatattaccagtcctgtgttattttttttttattatcctctttatgttttcttagagagcattggtttggtgtattctttcttgctggtacaaatatcctgtgagacttaattgcatttgggttctcttatctccctgctagcagttctgggggttatttagggatggtgttcttgttgaaatatgggatgacttgatttatagcagcaaaccaataagctaatgtgcctgtgtgcaatatggctgtgcctgggaagcattggtcatcagctctaagacttcaaatcagagaaaaggagctgaggttggaatggtgcctgctcgcctcgcgtttttactatctaattctctatcactttgaggaagctagataaaagatgactcaggacagggccattactttctttgatggctttaatatatcaaaacagggcaggctttcctgtaaagtcacctaaatgtggacactctctgatatggctaactaccagctgtgaaattgagacagtgaggactggggtggtcctggatagagaagagaaacgcaagcatagccatgttacttcctgatgtctttcacagtctaataaaatctcttccagatgagatacatctggcatagctctaagaacccagtcaaagtcaatagctgtatgtttttctaaacaccaggtttagaaatgcaatccacagtgcaaacgtctttgtcgagtacctgagtgatatagagttcagacacaaacctttttatttttgggtctctgaacgttcttttaacaatgtcctgatgtgacatcttttatgaattaacagttataggaaggacaatgaaaacattcattttaatgctactgttcctctcttatcattacaatatcaacagaagtgaacagaaattataaagccccataaatatatgttgatcaattgcaatatgaaacactccagaaccgaagtagtacagcttgctccttgggtctgaactgttcagagatactaagagtgatggtccccaaataaaatctgtcttctatgtcatgatgtcaggcatttttttaaaatgatgtcagcttcaaaagtgactagaagtcatttaacaaaatgaatgctaatttaacatttattttataattctgaaatatgagttatacaaaactaaatcatctgcctatccgtctgccattccattcctctattgtttctgtcttttcttttcaaagaccatttgaattatgttcagttactaagtatctcctttagagagtttatcatcatcatcaccatcaccatcatcaccatcatcatcttagcttaacatgagcattgtgccttatactttgagtaacaatttaagtagatgcttataagtcgaagttagtgaaaaatagagtataatctgctaaaaaaatcattaaatctggttcttctcagatctttcttgtcatgtttatcattgtaaatatattacacaagaataggttttgaaagtaaattaacttggcaacctgcctcccaataaaactcaccttgtatagtgataccacatttccatagcctaaattacttgcttttcttcctcttatactccatcacatctctgcattattcttgttaagctgtgttttccatcaaaaactgcctacattctgtagttactccgtagaagcccagagtgaacatctcagcatctgtacttttgaggcagcctttctcctgggttgaactgtaacaggaaacgtgaagaatctgaaagtggcaatgagctagaagaagagaaccaacttcataggccaacattaaaatctataccacgagagctaatttttctgccgtgctgagtacaccaaatgtgagaaatgcataaggtcaactcaataccaggagagcataaggaacaaggtacatggcttccagcccagaactttgatctcatttctattcaaaatgacagagacttgtaggggcaccagctcatctgaggaatgtgttcatcagaggaataattcattcaataagaaaatgagatccagagacaagaattatgacttagcagttaagaggacttagagttcttaggaccaagtttccatctcacaacactcaaaagcttcctgaaaggataatttcaggtgatccagttcatcttctggcctctgagacaccaccatttagacatccatgctgccaaacattcatacacacaagagaaaagcaaataactaaaataaaataaaagtatatgaatagtaatatttctgattataataagcatttagtgttaaggaaaaagctagatagtcaaggttaaactgaattaaaagccaaatgtttgtgagtctgtaggagcctttaggatgttctttgaataaatagcatggtacatttgtatagaagacatgtctgtccaggactcggagaaatcaaacaaatactgctctgtaaggtcctattctatatttttattaatgagcaaacatgggatagaccacaatgccactgcactagccacatagccatgaatgagtaatagcaccccctttttaaaagtgttttcaataatgagaaccatgacatttctgtcttgcttgatattgaaatgataagtgaaaacatctaggtcatataatgtacagatagcgcgcatggaagtcatggtattagggtttactcttgcaggggtgagaaaagtagggaatgttgaatgttggctaaaggaaaaacaacaacatttagtgaagtctcccagaatttcataccacaggtttaaggaaagctgcctcttaccttcatttctagagggaccatttctcttctatataatttcctcttaggcaacttgttagaggaaatcctgttatcacaaccaatatgctaatattgacgtgtttgatttatgatatataatagagtataaacctacaggttgtttaatcaatacttgatttctaggcacctataattatgtcgcagttcaaacatgagcactggttctaacatcctggacgatggtctccaattcctatctctccaggctgcttcctccctccacagtcttgtcttacttacagcccacatctttctagtgggaaaacacaagttatacaaagctctctccaaagcctcctttgtgtagttttaaccctggtactcctttctccctcctgtcctttagcaatccacataactgtgttctaagaagccactgttcacatcgattataagatctgaaacttcttcatccacaatttacagatattaatttgaaatatggctggactttgattctgagttcactcatctaaaggtgacaatattcttcaggttggaggtattaactaatgattaagtcttgtaaaacacacatatgacaaatgatatctccatgaccttctagaatagcctcatactgaactttgaaatgatcgtaatggatcatgaggaacatatatgctatgtttctatggattaaataaaaaatattttttttattaaccagtaacgactaaatggcaaaccaattactaagggttcataaaaagcctactatctaaagaaaggtattacgtgttttggttggattatttttatgcaaactattcatggcctggggaataacttaatgcctaagatataaagaaattactatgtctctctatcagttacattaaaaaggaggtgggagtggggggcagacacgatgagctactctgtaattgtagcactctagtggctggagaagaaagtttgtgagttcgaggcaagaaaagattcatattgagacatcatcttgatacaaaccccagtctacagaggagaaactggaatttcttaacagaaaactgaacattttacctacagatggaattttatctatttgtgatattactcatcattgaccgtgcatgtatatgtgtagacacatagagtaaaaagtcatactgaaatcgatttcctggtccttcattttagtttaactaatttgaagtagaggaagaagaatgatgaaggagggagaaggagttgagggtgatttttcctatggcactggggttacagttctcacccacgtcggacaacagacaaccacttgcaactccagctacagaaagtttaacacctgcttctatacatatatgtgaaagctcacaaacaatcacatatataaaaaaatgaaacgaatgtgtgatttagaaataagactccagataaaaattaaataaattgctcagtatgtcaaaggaaagtttaacttcacttgaatttgaaatgggagacaggatatctaatacatatctaatacatcactataaatattagtcttggtgacatcatgttcagataatggtaggtaccaaattaatgaaccaaaagaatgagacatttactgttttatgactatctgctactcataatctaagtatatagattttcatatatcttttattatataaaagaagacaaagaaaattcaatatctgggatctaattattacttataaaatatttttaaaattctagtacatagtttattgaatgcttattgtaaaataatttatttttggattaacgaaactctctatagtatctcagtctggcaaaaaaaaaataggtgctattagcttcattatgcagttacgcaccatatgttccaagtattctcttctattgcattaccaacagtagggtagccacatgatgcatcagtacatttgtttttaactgaatctcagaaattccacataagcgatatttaactgaatctcagaaattgcacataaatggtattgactaatgattaaccaacttgtctcttctcacctgtgttttacaactgtgatatattcttctgtttaaaatgagaacttttggatttattatgattcacagatttacatttggttaggaaagatattaatggggtggttgaaatccctcagtgctgaagagcacaggacactctttcacagcaccttgatttgatttccagaacccacatggtgtttcacaactgcctgtaactccacttctaggtgtctgatggctttttcagccaaggaacagtgcctgcgtgtgtcacatggacaggcttgcagtcaaaacatttacacatagtaaattttaaaaagaaggaaaaggtattttttttaagaagagagtagcctaaattctatacatgtaacagtcaatatgttttattgctattttatattatgatcctaactttaccaagcttttatttcacgattacattcatagttaatatggagttatgtatgtaaatgagtaaatgaaagcttaggaactttctattgtttctcttcacaattcatacaagggacttcagtgatgctgtttaaaagatctcccacttttaaagtaattgcccaaaatcttaatctgatctggagaggtttaatgggatagtaaaatatgtatgaacaactatggagtatggggtaagaggaccttttctgccatatttaaagtgatttgtgtagattttgctccacctggatccagtgtgcattacatatttctcttcaaaaatttctattccctcacgtctagtgcagttttacttcttgataatttccttgataatatggtctttcactggaaatgtctgtacacttcctcatattcaggaaggattttccactatgtcatatctgcagcatgccacacagaaaaatgaatttttaccactgtcttctatcaatctcccaaacctttaaatgacagaaaactcctttatagcttagtgttaagccaggtcacgttaagtgaattgtttttcagcttgattggtagatatattgaaagtctatgtcttccaggagagctggagtcttattccctcttgatgtaaggtttccttgtaaaaggctggaatgcaaatgattttatttttcttcaataatttaataaatgtgactgtatgagtacagtatagaagcttgtagaagatactggaagaatctgtgtcaagaatgctgccttcccttttggttctcattgcctcatgagaaaaacagatattaaaccaataaccacagcaatgaataattacaagtcatactgattgcagaaatagaaagacgtataatacagccactgaacacttttatgctaagaatttcaagttgagacttcaaagagggctggcatgaagaatgacatccacagaggagcagatgggaggaatatccatgtgtgatatccaggagaatgagcacaggggaagaaaacaaactcagggcatcttgaacatgactcaagtcatgttcactctaagcaccgtgagaggccaagaagtgggagccatcttaaataatgcattatatttctactaggttgactaatcaggaagtcattcttaactttctcatgggttggtgaatcccgataatataataatgtatttgttttccagcagaacaacaatttgcccaccacctttactttaaaagttcaatgtccataaatacacataacaaatactacatgagcttttaaatatttctgaagatcatgggtgactcagttaacctatgtattcacaactggcaactttaacttattttaacttcaaacactagccagcaacatgcagcagggatgctaggttatgtaagttgttaatggggcaactaaaaataaacaaacagccaaactccatgcaaatatatatttaatgaaaaatattagaaaaggtgggcttacaaagcttttgatttgacattaataaacaataagagattttagaaacgagtctgaagggatggttctgtagttaaggacactgacctctcacacggaggatctagcctcagttaccaacagtcatatggtagctctcaactgttacatgcagtcaatcacttttgcttatcaaaaaaaaaaaaagaaggagagagagagagatggagagagtgagagatgaaaagagggaatggagggagcagggaagagaggttgattacagaaatgaaataaacacagaggacttatttctattgtaaaattaatgaggggtgtttgttgaaacggatgctatgaatattcccaagaatgaagcactgggctttaggggtcattgcttggatttctctcaagtcttttgttttgatattttctggaaaagcaatgtgtgtgtaatatttggacttgttcttaagatgtgcgtgccttgtttattacttgtcagtctccggagcctagagagatgagccggctccattttatcacgcctcttcatgggatttgtacagtcctcttcattcagccctaataacacgctgctaacattttactgaatcttaaacacagctcaggaataaaaggaccatataagccttcttgtgtttatagtgccaatcaattggcgccttcagcaattattgactaattaatagttatcttagggaaaacagaatttatcagggatttatgtgtggaattgcaccacattgccttgtataatactattgctgatggaatttatataaaggagtcataagatattattcaatgttgacaaatatcttgggaaaaagtttattagaattaaactgtgattccttgttaaatctttactggtgatctgctcacttgatcaggatttaaacatatgctttgaaattcatgtattgttgactttttaattcatcttctataataaattactatagtgctctgagaacaaggtacaagccagaccatatttcctcctgcctaaaggaaatatagtgacaaggagtagagcagaaactgaaggaaaggccatccagagactgcctcatctagggatccatcccatatacagttaccaaactcagacactattgcggatgccaagaagtgcttaataaaaggagccaggtatagctgtccccctgagaggctctgccagagctagatcaatacaaatgtggatgtatgctgccaaacattatactgagcatggggactccagtggggaagttagggcaaggtctctaggagctgaagggttttgcaacctcataggacgaacaacaatatcaaacaaccggatcctcaaaagctctaaaggactaaaccaccaaccaaagcatacacatggggatagccatggctccagctggatatgtaatagaggactgacttatctggcatccctgggaggggagcccctttttcctgtggaggcttgatcatccagaatagggcaactgtaggccactgaggcaggagtgggtgggtggctggggaagcagcgtcatagagggagggggaggaaggaaggcataaagagcttgtggtggggaaactgggaagggggataacgtttgaaacgtaaataaataaaatatccaatgaaaaaattgatatgtgatattttgaagctacttttgttgattatttgtagaaaattgcctgtgtctgtggcttagcttaaattacaaagtacatctatctctttataatacagacacacatacacaaacacacctacccactcccctacacacacataaacacacacacataatttgaaggctggaaagatggttcagcagttaagagaatgtactgtttggcaggacacctaggtctggtttctaagactaacatcccttgactcacaaacacctctaacacccgttctagaaaacgatgccttatggaatccccaagtgcctgtgtgttacataaatatagacaggcacacatatccaaaataaattaaatatatttttaaaacataaatttcattcaagtttgaccacactctatgttcatcagtgaaatctccctgttacattgtcacagtgaaggtacactctagacacccagagccatcatctacctcaaacaaaatctatgaaatatagatatggagaatatttcttacaggattaccaaatgtttatggcaagaaaacatatgctcattcaaaggatagaatcattaaaggctacagaaaatttgtaaacatttttgtgaccttccgaagttgacagtctgtgagggagtaacaccttttttgacatgctgatcataatttgacatgctgggaagaagttgacagtctgagtgaataacacttttgatgctatgctgatcataatttgacactttgagagttttgcaggtggtggtgacatgggtctgcttgcttcataagcagggtgttgtggggggagggcacagcaacaaggccatccagcaagggttctcaggctgtttaactgagaacgagtcctctatggcaggatgaatgggctcattaacaatgcatgtagcctgttccaattctccttgtacaaggaccaataacgcttggcaccaggtaagtaagaacttgataaatatgtctcagcttaattaatctccacaaagtaagatacacagataagcctttaccatctctagttgaccaatacagagtttatattctaaggattgctttttttttgttcctagttaaaagtccattaagctattagagtaatggattatacactgttgattacaagtagataaatgtcttcaagtaggttgttcctttaaaaatcagtagtgagagcactttatctggcattgaaagtattgtgaaattatattatcaaagccttggaattttattccacggtgctaattgagaagtttactgtgtttattcatgtaaaaagatctacagtggcatcaatttagaagtattaaaggcattggatggttgaaagaaaacaaggctgcatgacacatacaagctaaaagatctatgaaatttttcataaattttgaaattttataatgtttgtcttagaaaacatataattattttataaagaaagaacaattttttgctgggattagaaataacgatttataccaatcaaacatttcttttaaattttaaatataaattattacctattttattgctaatgttttaaggcatacccctctatgcttttcaaattatgagataaattaaaataccactctagaaccggtatgttatccctaacacataatttaataatgttaacaaaatattttaatgaatgtttgaaagtaatttatcatatctgtttatgaaaaatttcactttaattatgaagttatttttcatgcattctgatctgtataattagttattgatataggtcatgataatgtgattgcatggaaaacatatacagatcttcaaggtccttattgaacactgacacattacaccttcaactggattctcaaaaaaaggaaggaatgaaacagtcacgttctttggttttttctagtttttcgagacagggtttctctgtgcagtcctggctgtcctgaaactcactctgtagaccaggctggcctcgaactcagaaatctgcctgcctctgcctcccaagtgctgggattaacagtcacgtaattaggaaaagaagatagaaatatattttcatcttctagacaactcaaaaaacaaagttgtacaaggtgtgcaattttatgccagcagtcacaatgcagaagcaggtggatctctgttagtttgatgccagcctggtctaggatgcaagtccaggatagtgaagactctgttacacagagaaacttctctccaaaactcaaaaacaaaagcaacaaaacaaacaaacaaacaaacaaacaaacaaacaaattgttggattatttttgtttttctgtttatagtctatcacttttaatctaagctgacaaaggcaagtttttgacataaaaaggaattgagttccctaaaagtctagcgattatttcctcttctggaattgaattctatttggagtttaaatgataatcatgcaaaagagcaaattgctagttctacctcatattgaagagggagtttgttcaaagaaggctacagcctttccccagtgttctggaaatagatttgacacagttatttggtgttttcatcttattttcttcaaggtccttagccagccctcctttaaaatggacagcctatacaatatcctgtttatgtgttttcagggctgaccttttgctcttggacagcaattgtgttcttccctaggaaagactactctcctaatgtcattccttattaggcacctctagtcctttgtctggtaggaggactcatgagctttcccacttcatattaatatgtttatgagtgtggttctgtttcgggagatgtttaggtaaccatctagaaatatttttttctttattctagactttacatttctgttttccaattgcagtttgctcattatagacgcattcattattcttgttccaaatcaagtacttactctaaacctgccatcctcccatttaacatcccaagataagcccgcacacagggactcagctgtagctgtcagttaccctctcagaactatgtggcagtatttttttacacagctttcacaaacaactggcttctattctctttcatttgcatacgtgctattttctcggatgagatctctgagaacactgactttctttagctcaggtaaatttgtgaagagaaagaaaggaaacagtggacagcatggttgtgcctcgaccagannnnnnnnnnnnnnnnnnnncctatctcatctgtgagaactttcagtcatgagggtcgttcactttccttcttttggaggtttctctttcagttatcagaattaatatagccacattgctatccacatctaggcacttttgtaaagcttatagcctgtatagactggagcacttaggaaatgacccatgttttagtatcactggattcatttgcagtattcagcatagatctagaaggtactggtctcatgttcacttagttatttttaacaatcacctattagtaatcttaacaagaaaacttcttactcataagaatttctaagtcattgaattaatattctactgctgaatttaggacatggggaaaacatattcatgttagaacctttttattgttacttattattttcttagacaaaacttttcctctgtagctgagttggccaaggaccttttctatagcctagccttgccttgaatacacaatagttctcctgtctcagttacctaacagctagtattatagacctgatttgccacagcagcaggcccagcaaaccacttccagttaatccagcctgtgcgttgctattttgtgtgttcagaacgagatgagctcatccacattcttggatcctaacaaatctggcacaaacctgaaaaactgtcggagggagttgttttcactgtggtccctggactagtaacaatataaccatgagatatatatcatgtgtgtgtgtgtatgtatgtatgtatatatatatatataatacagagagacagagagacagagagacagagagagctatacatatatagatatatattatactaacactgtgttatatgggacctttacttctatatgccactcagattgcaaatctacatctgcctttgtagaaacatttccataactatggccaagtcctacataaccgtgtactaggctgaggtcaataatcttaacttgaatttcaccagctatttattcaatagatcacagagtatgttaccagtaactacttctttacaaatttccacaggattttttttttttttgcattgtaagctgtaggacattttatcctgtttctaccaggtgctctcttttgaatttgaatccccataagcctcaagattcaacaggtaaatttattttgattattgtagtttttggttattatcattttaaatatattttggtttctgccagaaaagtcaagctacaatgaaatcctgtctcccaaagtcaatttgcaggcggcatctttaaaacaacctacaaaatttccagtaaatgaagtttcatcttgctgttaacgaggttgccttggcaaaactgtcagcattggagctgacccttctgtgttacagcatttgctccagctggtgctattggctgttaatcagatgtgtttatcctttttcattcgcacttgattttccctagcctgctcgacttgctactcagagttggttcattactgagaatattgttgcatctctgtcctgacatttcactgtcacctgcccatgacgggtcaatatcatgtccactgctcatcacaccaattaggtggtttaagcatctttctttttcctattcaatcttccttttagttgccaaacccggcctagtattaaaggggaggaaaaggaataatgagaaagcatactcttggtagagaatgctggaaagattagcctagtaaaatacaagaatcttttggagggcaaatttcaaagctaggagtagtgggaaccggtgaaccctgtcatctgtgttcatgggctgcaaagacaatgatcaatcctttggacttgaagtagcttattattaagtaggatgttgagcagaggctctagtgtcagtttaatagtctgctttctgctctgtatttgtgagattatttgcagaatgacgaactaaggaaatactggggagttccatggcaaatttggctgatagcctcccatttacctcccttcatttatctgtctacccctttcttgtttcttttcttttcttttaaccctgactcttgtcatctgtgtctagaccaggtattttcatcctgtgggagtcaaccttttcactggagtcacctaaaaccattggaaaacacagatattcacattacaactcctagcagtagcaaaattaccattataaaggggtaacaaacatagttttatgggtcaccctgacatgaggaactgttttaaagggttgtggcattagaaacgttgactggtgtcttgggtagcatggcactggaaattatatgcactgcaagtcatggaaaactgcaatcagtccctgatttgtagttccattgtgttttctggcccctaatgaagcaatactctcagatcccaattcaatttaaatctgctaattgaagataaagttgtaaaactatcacagcattgacacttagttttcataggtttcttgtgtatgtgttaattgtttattgatgttgtaccaattaccaaatgctggagcagagggtaaataagaaatcaccttccttaggaagagggttggaaaactcagaagagccccatactcaagaactgtagtatggttacctgatggaaatcagagattaatttatctcaaagattggatgatatctcagcaggaaaatatgctagggaaaaaaactcaagcagtggtggaggcccaggctctggcagagaaaaagacccaagcagacccatgagtaggtaagtagctgataatgtggagtacagctctgtggtaggagatgggcaataaccaggagagtgtatagaaagccaactggaggtctgctaagctatttgaagtgatcatagttactctttcctgaaggacagtccatgtagtgttttcaaatcagaaggttgggagttaaacatgaatttacatgtgcatggtaatttttagtagcttgatgttcctataatctaatatgtgatactggatacattgagaggagaatatatgtgctccaagatgtttctgacactgagaaatctaagagtttgacaccagcaagttctggtgaggaattctctttacttcctatatgtcttgataccacatcctttgaagaagagggatgtttcgtcttcacatggtagaaggctgtaaaagacatcaaacatcaacttcctatgaaaaattttcactatctaaccacttattcaactccacacttctctataatattgtattgggaaataagttctaacatgaattttgagtgggaccaacagtgaaatcaaagggaaaaaagcttggcttataataaaattattattattccagagcataggaagactggagtcaaaaatataggttctcaattgttaggttggaagatagattgatagccaccatgaaaaaaagactgttagaattcatagtctctccaggaatgtagtatgtgataaaaaaatgtaaattctttttaaactattgtcagcaaacttttttttgaatggacagataatctataattttagctttgggaaccatctggtctccatcccaattacttaactcttccattgtagcatgaaaccaacgtggggcagaatgccaactgacacaaaattaaaatccaaagattgcaataagtgaaccaacactattttcttttgattatttcaatttctttacggctccttaagatgcaaaacagagaggcaaaacaaagcacattctcaattgaaattccatatgcaaacaggcagtggagtattcatcaggattgtgctatgttgctatgttctgttctataccgttgttctatgtttcttattttcttcgctataatgtcattatattttagtagcttttaaattattaatttataatactatttttcaatcttaaatgatttttcctaccttctctatgaattccctttatttttttcattgatctctcttcctgtagcttcgtcctttcttggatttcagttggtatttatggctgcccatttgaaaccataattgaaattcactgtaaccttcaaactcaagtactaacagtattcttttaaaaccttagttaacatgcatataacatgtttgtctcgtagatctttttgcttacctgtcttgccacatatgatatcttggtctgtttactgcttataaatgatagaaaatgaactctaacacctttggaatctacaaccagattggatacctaattgtggaatggccattgagaacatctgtctataaactccatacattttctgtagagttaaatgatagtttcatcacctctcctttgcgcaaagcacttgtatgagtctcccttattttggaacaatatcaggcatagatattttgcaaagtcacttcaggtaatggagttaattccaatgtgcaaatcttgtggaggcatagacattatattttattcctcaataaatatcactatatatctgatgatatggagacatctagtctgatggacaaaaacatttgtatttaaacctcttcttcttttttaaaaaaatcttttatttttctttaacagtgcagagtgctctaaagacatatacacacaagcagcattaatgggacttagcaggtggtatataacagtagtaaagtatagattagatttatgaatttgaggtggaatcaggggacattggtgggagatagagtcagggaaactgtgttcaaattatataaatgcattactcacgtcaaaatttttcaaaaataaacctataaatgtaaagagaggccatgaatttgaaaggagaccaaatatgttgcaggacccttcctggagcatgcactccaatggaaatagaagtgaagggatgccaccagggactacgccggaacaattccccaaaggcctcatattgcgtccatttttatataaacgttttaaaatgtagagtgctgttttcatgctaatcaataaaagagtatgagacaatgccaaaatgtcattagaaaggatgaaggataagagtacaaatgacagacaatgaagtacaacatggtctaggtggggaccctggctggctctgttattggtgcctcttataaatgatcatgctagcacttcgatcagagtcatgcactgtgaataccttgtccaggttcatcagacctgggacggaagcaataaaactacagataatacagcagcaacacccatcattttctttaagatagattcctaagttattgtgagggtgacagggagggattgaagaaaaagaaggtagaaaggttgaatggctagatactgattgattgatttatctattgatctacttaatgtgctggttgcgcggctcctgtctcagcatgacattacttgctgcctagcctagaataacctggagaaatagctcaaacaatggatcactgtctgtaacaacccactgcctgcaccatacactgctgtcaaatctctctagcttgtccaccaaagtttggggtttaaagtatagaatcagatttcattctgggtcagatatcaagggctttctggagctatcttgtctgtggtccgcaagtaacatttgttgtcttccagtcttgttggtgtcagagttctcatcccagaaagattctggaaacagaagaagctatgagggtgagtttagatggaagaaaaggaattgaaaattgatgttattacattacaatcctcaaaaataaaataaataataaaaattaacgttaaaatttagatgtaaatatgtcataattcatatgtgacacatttttaaatatatacatgtatacagttatatagctaatgacacaggctttcacctcatttctttctctcccaagtattaccaaaggcaatgggaaaggtttttaaattgaaataggcctcgctttgtaaaatatttattttcaattcgcacttacccctgtcaactttatgcctacaaggcatcagagacacttggtttcgcgtgcacactccactccaccttctaagaagactgcaaagcttactacactgtgtatctaatgcagtcatttaacattttttaaagaaagatatgcattaattacaatgtacatgtccaaggatgaatggtttttattccggttaatattcaaatgaaatacaaagcaaataccaaccatgtgtcttttaggcttgaaggggttgcatccggcagtgtttgacgtgtgctgttatttgatccagtgcttggcaggttttagttcatccctgacagacggctactgcttgacaaaagagtactgttcttccacagcatttactggtatttgcatagcattgttttacttagtgaatgtgattgtgttaaaaagtaacctgtgatgatgtttaaagatggttatatcattgcttagcatggcacagagtactgaggatagaaaagattttgctgcttgtgaatcaatagattaaacaagaatacactgttattgacaggaaagagtaccaaaatttcttcccaagagtgttcctcaccccttatcccacacgtaacatggatgcaggagtggttgagaaggacttggagattctagtgtccagggatgatatttagggatactcagtcaaaatccccagggacaggattattatattaaaaatcatgtacacatcaggtaggccctactcttggaaacaactgagatcttgggccactatttatgcatctattttctcatattcatttatgatacagaagtacatattttctagatggctcccagctccagacttgattacatatagcatgctgaagcccacaaagacagaaagagcaaggatgggaccactaatttgatagacactatatttcataaaagacactaagaaaagaagaaagctcagacttttaatagcccagataattttgtgaaatttgaaatcacagtgaagtaacaaagatatttttgtgcatgtacatgcacacatatatccatacgcaagcacatgcacgcacgcacacacacacacacaacacacacacacacacacagccctaagcctatgcaaatgaaccactgtgtgcatgtgcaccacacatgggcataattatatgccaacatatacacacatgtatgtggacatgcataatgcacgtggacatacacatacatacccaaatacaaacacactttgaaattgaaaccgtaaaaacatacaaacataagtaaagactataaatacctggccatacagtataacttctaaaagagcaaagctaaaacaacaggagctaagcttttcctagaagatttactgagctgcaaaggagaaagccattaggaactgggttgcagttctttgtgtgttacacattcctattatgcttgcaaccagttctactccatcaaagtctgaactatctttcctattggtttgtgtgctttttaagataaaaaaaaaggcagcgttcctgttcatcaatgtgattagtcaaaagtgagctcttaaaacctgttcatggacacacaatcacttcacattcttacctgattagcagcaggttaatgcgaagaacttcggttctggtattttttaaagtacataatttgaactattaaactttaatttaatagttatatccttgccattgacttgttcaacacctctgagattggtttcctgttgaataatattaagaacaatagtacaactttattagttttgtttgaaaatataaatctggaaattcatgtcctaagtaaataagcatgaagaagcaaacataagtaccattcttaatataacacttctgaaattctgcaagaaaaccatggaccaggtgaaaggattgtaagaggcagtgaagacgattttcttactgttatatggcgtttctttttaaagtggaacaacaaaaccagcaatgagaggaattacagctaataagctattgcatgcaattcattaggctttccctactacttctacagttactaagattaactcgctgcttgttctcatattgttgtagcagtaggcagcatggaaagatgaggcacttcagaagaaatgtagaactccagaagatgtaatctaataagaagtcctcctcagtaagcaatgtagaatgcaggctacagtgaatttgcaattgaatctggacaagagcattcatcttgacattggtggtgtgatacagatggaatagagaatgaatgaggccaggcttgactgcagttggataatgctactactctgatgtggaatgccacagactagataacttctaaataaagatactgcaaaggttaataggtacagatacattttaattaaatgtttaatgcagagctgatacctgacaaaatctagtcaataatcttatgaaacctgatgggtggcttgttgatgggacaagacctatcttagaactactatttaaataaagtgtaacatcatatctctatctacatgtatctacacacacacacacacatacacacatatataaaaccatgtgatttagataactccttttcagataaccttttccatgatactttaaaaatgagtgcagaaacccataactgctcagtgtgctcgaactgttgaatgctcagacctagctatactgtctccacaatctattccaattcccagacacatgccaaaagacaatatgaagaatctaagagcctaatggtggagaaaaggaatgcgggatgttatcatgtagtaggtctgacatggccattgcaatcatggactcatgctacatatggttctatgcccagagcatgcaaataactgggcactcaattcaggcacagatgaatagagtgacattggaaggggggcttgccttttcttgctgaactttaaagctatcattgaattcttgggaagtttttgtcttcagtgacatagctactggtgaatcccacatgtttccatagttagctccatacccactttctcatgggaaaacctggttaaacacatatagtgaaagaatgagtccatttatctaaataaatggactctttcacataaatcagggataaaggatcaaaggaaaagtttcctttctttgctttgtttgtttattatattctgaattgtatttatttttcatattttttttccaatggcctaatatgacaaaacctgcagtctgtctcaggaagcatctattttaaacaaacacatctctagatggcatctgttctacacagaaactgaacatcagcatctttgatcccatggtgtcaacatgggtacaataatcatgatgaagaagaatatagtgggaactgattgcagaacaattgattcctgaatccaggcttgaccactggccaaaccaagtcaacatgctttttaatcatttaccagggaaataaaattgggtgtttaaaacaaaattcctaaggtaaaaacagaagaagaagaagaaaagaatctcagtgctactgattgaagaataggtctcatgccaggcagtattcagcgtgtgtatgttgtttatttatttgttcatttatttgtttgtcttatctcttttatgccttttgtggccttctccatcctccttataggtcttttgcttatatattatggttctcaattttgtgtctttatgcgctttctgtgtgtgaaattatgcctcttcatttagctttgtttcttgtggtttttttcctttggctatactgtttgtttatttgtttgtttgtttgcttgcttgctgttttgccctattcagatttgtttgttggcttttatcttatttttctcttgtttttaaattagatgcctgttgtttctaattatagagaataagaaagcatgtagaattttgtggatggggtggtgggaaggatctggaagaagctgagtgaagggaaaatataatcagtatatattttatgaaaacatatctattttaagggcaaagatgtatggtgctactcttaaaacaatggttcaaataagagtatatgcttgacatatttttaaataaaatttcagtaaaagaataaaaataatcactttaaatttaaacaaagtatttactatgctagatttatttaaaatttagaaataattttagggaaatacaaagaataagtaaacccatgctaaaacatattaaaaatatatagtcctttgagttacaagtagattaaaatacatctagttatgtctttttactcaagaagaaaccataaagacattaagagccttggttaaatttaaagaactaacaaggacagcaccaactgtttatttttacaacttggtttacaatatcctataactatatccaaagtctcatttaaaaaattaaaatttgatgttctttgatgcgtctatatctcattaaagagatataaaaattatccatgtcccacttgtgattatgttgtcattgagtctagatttgttcaaattaggcatcaaacataaaagtgactattatgaaatcattttgaaatttgtctagcatttccaagtgattcataagttatctgactctaaagaaatcagtaacactaaaagaaatttatatgaattatggttaagggtaaaactaagaaacaattaacaaagacatcatgttaccatgtattttagtacttgaagttctttggggattctagaaaaatatttaaaacttagaaactttgatttctcataactaaagggctatttaagtttgtttgctgcatgtttctaaaaatgaaatgcatttcattagtaattaaatgcattcaaacaatgtatttgcattatctatatctatacaatgggaaggtattagataccatgaaaattgatgttaaacactattgagtaagatttgttatatgctaaatattgtatcataaaagcaacacaacttctgtggtagcaactagaagttaatttcttgatgctgtaaactccacttttcaatggatgagattaaactctcttcagcatatagtcataaataagtgttgtgattccagcctctggcagggtctctcattacaacataggccctttaaggtcagcttatgtgtgtctagcacaatagtgggatgaaggtgaatgcagagtagatgaaatttgtgtaaaatccagaagagtggttgtgttgagccagtctggaggcagaaccaacaaataaatattctagaactcagtgaaatcactaattctctcttccaaggaaaggtgatgtagccagctatgctcttaggatgaaataggaatgagttttgctgaacacaaggtaattactagcatacaattctaacacttactacccacgtgcctataaacaattggctcaagttcactgactcagtttattactctattaaaaaaataatatttgccctgcttgtctgcatagcattataataggtatgtatgttaaagaccctgaatgcacagtataaactgagtattctaaaaccatatcatttattaatactttctaaaatatacatacaaaatttcattattatcaataatatggcatctattttaaagagaagaatattgtaagataacaccccccgccaaaaaaaaaatatatatatacaggactatctgatgaacgtcaaaagattttactgcaagtattaatgactgtgaagctgggatcaacggtggacggatgcactgaagcaaggtcctgtgtcaggctttagcagatttcataaattgaataagtatctagatgtttagtatcagatagaggttaataacaatgtccagtttgccacgttatataagacactgaactgaaatcagaacagattatgaaacaagaatgtggaaagtagctgaaatgttttagaataactgaggttaatggaaatctctgaaaagcaaagttatgctatctttatcaaagccacaataatttgtgggtgaaatattttttgcaaatgccttcttttttcaatgctttttgatgcttttgtaaattggcatgataagtaattgaatatcatattttatgtgtctcaaaattttcactcataatcaaaggctaaaaaggatttttggtctattttaaagtgttttatattttatttagttaaaatcagcacctgatatagttgtctcttgtgaggctatgtcggggcctagcaaacacagaaatggatactcacagtcagctattggatggatcacagggcccccaatggaggagctatagaaagtacccaaggagctaaagggatctgcaaccctataggtggaacaaaaatattaactaaccagtaccccctggagcttgtgtctctagctgcatgtatatcagaagatggcctagttggccatcagtggaaagagatgcccatcattcttgcaaactttatatgcctcagtataagagaacaaaacaccagggccaagaagtaggagtgggcgggtagggaagtgaggggggggggtatgggggactatcgggatagcattggaaatgtaaatgaaaaaaataacctagttaaaataaaataaaataaatataaaatccccccaaaattctgtatcccttattatttttgatttattaataaaagaataaataaaatatcagcaccaaaatttgttactcaagacagaaaagatggtgtgtgtaatatgagttgtcagaatctctttgcttctgacttgaaaggatgcaagctagagaggctgcaggatcttggcatgcctgcatcccaactcaagaacatcatggtcattttggtagagaaagatgatcatgcattgaaatgacttcagtgattggctccttcatcagaagttgtcattgatccttaatgctaaagcccacatggctaagataagatataagagtgggcacttgaagtccctacaacatctggatgccacttaaggactagatatcaagatctaattgggctaagtagagaggaaatgagcagtttcatggcatgcttaacagctcccgtcctggcaacaaaataaccatgtcctcagccaaaggctcacagctcaaatctgcatcattcaaatccacagggcaagcggtaccctgtccagtgtaaggtttttgtttacttgaacttaagcatatcatttacaggaatcctgcattttttagcatcataggaaatatagaggtataataaaacagactactaaaatagccatctcttctcttaagaattgaacaagattttgcctataaagaaaagcatttatattctgcaatatctggatgtgaatccgtgtgcaatgatgtgaaaaaagatgtaagaagcaggggaaataaataagcataaaaattactaaaatgtccaggaattggggaaacaggagggtttccaagaggtggaatatcttaagttgggccttgaaattggctgagcataaggaaagattgacagtactgggacaccagacaagcaatgtgtattgtggcttaaatataggaatggctgtggcatgcttcactgaggaatcgatttgaagcctctggttctattttcaaggatattttcttatacattcagaggaacctcttgaaaggaaagttttttttttcttttgtgtgcatgtgtgtgtgtatatacatattactgatatatttcatataccatatactacatatgcatttcatatattatatataagataaacttctttttgagcacctttggacaggttcatctgattcccgtagaaacaaaagcaaagcaaatgaggtcattttccaccatgtatctaagtacttaccaccaaacctgaacctctgagattaatccttaaaagctacaaggtataaggaaagaataagctcctggaatattttcccctgaatcacacacacacacacacacacacacacacacacacacacacacacacacacacaaacacacacacacacatacacacacacacacacacaaacacacacacacacacacacacactcatggacacaaataaataaatacaaaaaattacatttgaaaaggctccaaaagaaattaatttccagtggaccaatgagtttgagaagtgtgtaggagcccaaagtgaagagcatcaagggccaacctaagcaacctgaattttgtgggtaagtaactgtaatttctatcaggccttgaaagcagctacttgtagctttataggctgcactgtgagccagaatgcttgaatgtgagcatacattttgaattcgcctgagggggaagcaatatgtaaaacttaccgaggtgctgtaggagccaaactgtgctccaagtagccatctgccctggtttgcatcttacccatcacacaacttcattagaacaaatcttagcatgaggcaattatgcccattttcttggtacatgaattccctgatgttgtagcaaggcgcagattccccagcaaatgtttcaagtacttctcagactgagagtcagtgtgacatatttcaataagacatgaattcagacacatacacacacacagattgagaaatattacttgcaagtgtaaataaatataaagatatgttgcttttccattcctgacagagaggaatatttgattcatatgtttaatatgctttgccttttacaggggaagaaactaagggaatgttactcctcacaccaagaaaaattttaaacaagtttcttataaataggaactaagatctgagggtgaaaggctgacagggatggggggttaggaattattcaaggaagaagaatagctgagttgacattcctatgtatttagaggtttggaagagtgttgggacaagaggaagaaacagaggacacagtcttctctatggaccatatagccccaggtggctatgcactcacaatgctggagatttaggtgaatttcagtcttgtgtctagttcaggcagctctgaaggatggagtcttttgataacccagctgagatcctttgctaggcctcttatgaggactaaacttgaatgttctcaacttccactagtgtgtgctttacaacacctggctgttggttttaactccaaacaactatgatttatgattttcgatgccagatgtcccttatttgtatatgtggagtgtattctaagtttttacaagtgctgtgctcagaaattcagtttggaaaacaaagccaatatccagtgtctgacagttggctctgaggagctggtgtcacttcctagaatgggatctatgagacagcaggtgatgtcataattcatgagataacaaatgacatcatcattcatgagataacaggtgacatcaccattcatgaggcaacaggtgaaatcgacattcattggcaggtggtattttcatttcgtaaaaggaacagccttactgtctgaagtttaaggtaaaatttctcttaaaatatattcaccttcctaaaggaagtcatattaagtttttgttgccttttatgaatgaatggatcatgaagaaatattatacactaggaaaaaatgtgcagaagtgaaatatttaaaaataaaaaaattatttacttcattttaattatgtcctgtattttcattccagttgttgccccacctcttggtctcctttcccacagtttctcatccattccccctcccacttacctccaagagagtgctagacccctaccaggcctcccctttccctggggccacatgttgctcaaagattaagtacatcttctcacactgaggccagaccaggcagacctctgctatatatgttccaggggcctcaggcagcccctgtttgcccctgtatgtcagtctctggttgctccttgtgttctgggttagttgagactgctggtcttcttatggggtcaaactccatttcagcttcttcaatccctctattacaaccacaggggtccctgacttcagtccaatggttgggtgtatctatgtctgtctcagtagtagtcagctactggtagggcgtctcagaggacagccatgccagactccagtctataagcacagcatagcagacaagtgtcaggccttggttccctgcccaccctgagatggatcccagtttgggctggtcattggaccactattccttcagtctcttctccatttttgtccttgcagttcttttagacaggaacaattcttggtaagaaaatttgattgtgggttagtaaacctgtctatctactgcaggtggacttttcaagtgccctcttcccaatgttggatgttgactccctgagagtctctcatttcccaagtcgctggtactttcttttttttttaaattattatttatttatttttattacatattttcctcaattacatttccaatgctatcccaaaagtcccccataccctcccctccacttctctacccactcattcccatttttttttggccctggagttcccctgtactggggcatatacagtttagagagtcctcccaacctcccattcttcaaggctgctcatttccactcattctcttggccctctgagtttctctcctgtcccccaacccctcatacctgatcctgtaccctgttcccctccccctcctctcttccacccaggtatctccctccctttgcctcctgtgattatttccttcctccttctaagtgaggttgaaacatcttaacttgggcctttctgcttataatacttcttatgggctgtgggtagtatcttaggttttctgtacttttttggcttatgtccacttatcagtgagtacagaccatgcatgtccttttggttctgaggtacctcactcaggatgatattttctagttccactcatttgcctgaaaaatttatgatgtcctcgcttttagctcaatagtattccattgtgtagatgaagcacttttcctgtaatcatttttcagttgagggatatctgggttatttccagcttctggctattacaaacaaggctgctgtgaacatagtggagctcgtttccttgtggtatggtggggcatttttttggtatatgctcaagaatggtatagctggatcttaaggtagaactatttccaaatttctgaggaaccaccagattgattcccagagtttttgaatcagcttgcattcccaccagcaatggaggagtgttccgctttctccacatccttaccagcatgtgctgatacttgagtttttgatcttagccattctgagtggtgtgaagtgaaatctcagggtcattatcatgttcaaaagaaccagatatgaagcttccaaaatgcaaagatagatctactctttcccgtagagaaacaaacaagagcatggaaacacagacctctacaaaagattggtggacttttacttaaaggaacacatttcaaattgagtaggtttcatgagcctgtagatttggggaaaatggcgaatccacactagaaatctgaaaatgagcaaaaagtttataaattaataagtgtgcctgtgtttccacaaaactttatctgaaaactttttaaatgaaagttcatacacttttccaaattatactttttaattttattttttatttccttcaggccttaaaagatacaataaatatatccataatatatgaccacaggaaaaaataaaaatgtgagcacacatttatataggaccacatattcttttcaattttctgacaccccatggatatgataccttaattaatatcccagttaatttattagctatgatttaattgttgttttaatgcaaaagcatgcatcaagcatgtaccatggttgagcaacatagtcaaaatttgctcttttccagtatttacatataatctgatatcttggatgtatattctagttatatatatatatatatacatgtgtgtgtgtgtgtgtgtgtgtgtgtgtgtgtgcgtgtatgtgtgtgcgtgcatgtatgggtatatgctttttaaaaaaatgaataaaagtagcattgtaatccaactttgagtggagtggctaggatcatttatttggatattcagatatggattttaattctaattttgcctatcagtgtacaaatagtatgactttaataaaaggaaataagctcttcaagccttattttttcttatatataaatgagaaatggtgttctgcttgctaatgacagaataaaattatgtgtgctgatatactctatggtttgaaatagtgctagtcagtacatgatcatgtgatcatatcaataatagaaatgatcacctgtatgaacaaatacacatttatatcactggagagtatgcaggagtagaggaaacaacatctgtttcgacacttatccttttagttgctgcctgtctctcccttgtagatttcagttgcagacttctagctatgttctctgtctgcatattcttctgtttatgtgaatactcaggtttttaccttgccaaagtatagaatgaatatgtattcagttggtcttcctgatatcttgaaatacaaaaaatattttagttttgttcacttaaaatgcctatgggttcctatgtcctttgtttagtatgcaataagtactcagatgtacagatcagaaactagggaatccttcttgctttctccatttcttcccccctttctttcccttaacctggcatgagaaaatcttcaccagtttcatactcaactgtatcttttagtttcattgtctgtcattagcacagctcctctttcagctctctgttttatggcagtggccatcatcacatcatcaaatggttttgattgttattttaatgtaaatttggccttacaattctcagtgaagatttttgtttatttgtttttgtttttttttaaattttatgcactgtagatgtgtctttttctaaagtagttaactattctcacatggctctacgttaatccccaggacacatacacatacatacacatacacagagagagagagagagagagagagagagagagagagagagacagacagagacagagagaaacagagggagagagagaaagatggagagagaacaaaaaacaaggaccatgaaatttcatggtctttagatggagactacagttttaattgcctttctaggcattgctggttcatatcctgactacatcctccttcagcttctttgtacctaccctcttaattctaaggacaatagttttatttaatcaattatgcctaagtgcattgattcccatattatttttgtagttgtatgcacagtcttgctttaaatgactgcttccccttggaatgtacacatcttgagtgtgtaggttagcaccttaaacattttgatgttttactgtatgcaatctcttgcagaacacataattgagcataacacataacagctgaggggatgacctagtctattaataagagagaatggatcattctgcatatgacttagcatactgtgttaacatatcccactgaattcatatattcttaacataatttctgttgctattgacactaaacaaagactgtgaaaagatacagaattctatctaccaggaaaactgatggacaaaatgttcaatttcttcttgcttttctgcttctaattttacaaccagggaagactcagagttggacatcacatctctaggcatgcctgccttgtgatgctaaatcaaaaattttcaatgttgtgtaaaaggagtcttattattttcatatactatatctcatgggatattcacaagaaaattatggcgggtataaggaagacttttatttgcttattcttaaggatagtaaattatgtcatttaaaatcatggtggaatttgcaagatactcacaagtacatattagtgtacagcaaaatgctagcatgagaatttgtgtagtttccacttacatcacttgagccacttgtcttttcttctctacatccctgaaggagcaatgaatttccttgtaataaatgatggggccacgcccaatagagatgcttcaggtttgccctgagatccaacaaccagatacacatggtctccaattcggatgacattatcactaatgcgggaaaggcattttatcatgcttcatccaaagcccatggaatatgtaatataatcataaggatagaattaattaggcctccaattagaacagaaatgttggggaatgtgttagtgtttgagccaggaggctgagctgagagcagaaggattctcaactgttccaaaagagcttatctgcaaccaacactttgcaaattggttttctttgcttttatgccaactttttgcagtcacagtgggaaattccagaagctatcctccatatctgagtaccatattttccaaattctctatatgattcatacacataactaatagctcaaagttgacagagtacaacctggattcaattgtgaggtgctaatattattatactctttctaggtggcttaaagattatgtgactttcaccagaagctggttgctccctctaaaccagaaggagggggttatgtgatatccattatcatcttgcttttggagaggaaagttacacctaacaccccacacatttcagttgcatctaagaatagcaagacattgtctgacaacactgaattctgggcctgtggtctgtcattttgacatttacattgaagataatacctaaccccacattctgtatagaatgtttaaagttgcctcttgtttgttcttaaaagtaagtaagggattagaaagaaagaaagaaagaaagaaagaaagaaagaaagaaagaaagaaagaaaagagaaaagaaagaaaggaaaaggagaaaaattggcaaacatgatctttttcaataatgaaaacataaccagaatggcatttccatggtgaatacattctcacttttggcttacgtatctctttagtccacactaagctgatggtatgagggatatgcgacatggagaaaacatgagcatatagaaagagccttgggacagagcatctacatccgcaaccatgaggatgctgcttgagagggaacatgtgccctcccctcactcactccggggctaattctgcaatggactaaattgaagaaaggggaaatgatttcctttctttaaacagaaaatgtcatggaaatgtcagatttctctttgtgtgatctcatatctcttaaaagtcggtagctgcaagccactgacacactaactatattggaaaacatgatttcggtgtaaaagcaccatttccaagagactgggcctcagaagcttcggaaccattcaaaggtaaatggtgagccatggccagtaaggttttatgaatggtctttaggttctgatgaatttgacacatttacagaactcttaatgtctgccctgtccttgggtcacattctttaagtgctccattcagtcctaagcatctctcccattgaaacatccttgacattctattttcaggggtgtgatatgggaagaataaggcattttgtcatgctgtgaagttgtccctagctttaggcagcactgatatgtcttgtaaatcatcatctcatacttcaaagattctatgccagtatcttaattttgtagaacacagagtcctgtggtattaattcctctattagagactttttcttcatatcagctccagatgaaaatgtactctctttataacaagatgaagagtgatggcgaggaattgtggaagatacactaaggtgggatggggacaatacttacttacaggaacttttttattttctgtgaataatctcaatagtcttgagttaaccaaatacaattgtgttataaaggggatagacagaatatcatttatgagtattaatacacaaatattttatattgattcaaaccaacactgtaggtcattcaggaacattttatctctcaaagttaataatgtattagaaaatactagtgcattaccatacagttcaaaacacagatagataaaatgctgaatcagcagagaaagaagtcttattttatcttaagtatgttggaagctaaaggtaatgaaaaagaattatagatagaaggtaggtaagtgtagaaatatataatgtgattgtacaattagaagcaagaaaacactaggccaatttttggagacatggagagttctgcagtgtaagatatataaaggtaattcataagggacaatggaattgggcagatattgaattaagatttttaaatactaggctgaggtaatgcatttgcagtgggaagggctgggctgaaaaatcagaaaatgtcaatgcaaagatgaggcttaggttctatgctggtcaatctacagtgagaatgtaacgctgcttaaagacacagagaaaacagtaagatataaaactataggatagtgacattgaagagattcatttttgatagtctaacattattgttaactgggcaggtaaaatgatctttggagaggggaaatgagaactatggaaggtttcattaattcttttaatatgttcatagctataagggagagactagaacttacttcagctgagattaaacataaatagtaccagaccatggtaaaagcccatctgagacaagataagcaaattcaaatattctagcaatttagttagttagtttgttttgtttgtttgtttgtttgtttttactaactttaccctttgagatttttttattgtaaagatttatcttcttttcagtacacacttatcagcccaaagctcctattaagtggaagattctgtccaatatatttcatagatataagagaatgtgaataagattgactcccatgtatattgtgatcttatccacatattatacactatgtatgttatatgttatacataatatttaatttataatatacatacagtgagggtttttcagcagcgttgtgagatatttagtgataattgataaactgaaagaatttaaaatcacatggtagatgagtctctcaaaatttatgagagaatatattgattatattaattggtgtagacagacccatcataaaatagacaagacctttctctaggtatggaatcctgggttgtataaagaagagaagtggatgtcccctagcttgtcacaatttcttgctgccttctgactgcagagataatgtaactagctacacacagttcttgctgccttggcactccacttaatgaactatatcctttgacttttgttccttttaagttgccttttgtcaagtatgttattacaacaacagaaaagaaattaagaaataccaagcaattaggacaatacatagtagtaaaatgatatgactgtagtctatcacctaccaggcatcagtcttcatctgtctcttatccattgctgttttactgtcaaactccctgtcttgagaacattccaagtgttcatgataaggtgaaggaagtaattgcctaagcacttacacacactatagctagaatctttttgttttgagaaaagaaaaaacaacaacaacaacacaaatttcttttctgtccttcctaatttagactgagcattcactctcactatagctcttagcagataaaacacatagtatttttatagatatttgttaatagataaaattcattgcattcgttttgaataattgctttatagcttctctctgccctggccacactagggctccttaactctatactctttaacagtacaacagttaatctgctaaccatggggctactaagggacagagactgattcttgaagagaaacttgactataaagtgattcagatcctgggcaggctggtgtgggacaaattattccagagtggcatagtgttacatcattgaagttacatagtgttgcatcattgaagtcattgcttttggaatttctcatttagtattttctatagtgatgacctcagggtaagccaaatcctcaggaatcaaaagcacagataagtgttgaaagcacacctatagatataaaattttctcaagatgttcttctgattcaatctcgagaggaagttacttccttgcttgattttattgttccttgttttcttactacgtatgatctcacttgaaaaaaaaaacactgttaagtaaacggcgttttttttttttatgataaaaatgtaacaagcataagaagtgcagtttgtcaatgaagcatgaaaggaagcttagcttgctcactattttaggccctttcccatcacaaggtttaatagactgcctgccagattaacggagcatcttattcactttatcagtttctatgtgccctaaggcttggctcaagttataacaacaacaacaacaacaacaacaacaacaacaacaaaaagtgctaacttgagtcatttaattttattgaggctaaactacacagggtatcagacaatgaattacagggaaataatctcagttgccatgttaaatataatattatacaaatattttactttagagtttttcatcattaaagtagcaaccttcatattactgtaaatgtgcaggctaatattcccactgccttccttcctgtgagaaaggaagtctctgtcacctctattaaatacttcggcagaagaacatttccaaacatccattgtgacttccttgcaaatcattagtgctctttggtttccatatcacggccctggcctttatgagcatgcctgtggtggtgtagtttaatgcctgtgctgttcttccatgacctcttccatgggtgaaagagttgtttcttagctgtatatttgctatgtttaatacacattttcattctcctgtgttccactgttgttgtaagaagtcagggatatgtgcaggtgactgtaaagaaactcctcaagttcctcattggtcactatagaaactgcatcagtctctatagaagcacttctgttcactgaactgcttcacttggcaaactaaacagcatcaccttcaatcacacctcctgtgaaaaagattatgttcccctccttgcttcatttccagtaagctgtgacctaaagccttggccactctggtgtcacataaggttttaatattgaagaacagcccatctgcaaatagtgatattttaacttctatctttccaatttgtatccctttgatctcattttgttgtctaattgtgctggttaggactttgagtactatattaaataggtagaaacaaagtgggccgccttgtgtagtccctgattttagtgcttcaagtttctttccatttagtttgacaatggttactggcttgctgtatattgcttttactatgtttaggtatgggccttgaattcctgatctttccaagacttttatcatgaaagggtgttggaatttgtcaaatgctttcgcagcatctaatgaaatgatctttttttttgagtttgtttatatagtggattactttgatgggtttccacatattgaaccatccctgcatccctggcatgaagtcttcttgatcatgggtccccattggaggatctagagaaaggacccaagaaactgaaggggtctgcagcccttcaggttcaggaggaacaacaatatgaacctgtatccccagaactcgcagggactaaaccaccaaccaaagagtacacttggatggacccatggcaccagctgcatatgcagcagaggatggccttgtaggacatcaatgggaggagaggcccttggtcctgtgaagactcaatgatgcattgtaggggaatgccaggaccatgatatggtagtggatagtgggtaagttggtgagcagggtgagggaggaggttgttataggtttttggaaggaaaaccaggaaaggggataacatttgaaatgcaaataaagaaaatatctaataaaaaaagaataacccacctggcattctgctctaatactaaccctgtactctaataatagagtctatacactaagtagtgatttattttcaacatctaattgcttttgcttctactatagaactcccaaaactttcttttacagtttatctgcttgtatttcacacttgactgtctttaactctaaatgttggtcactgtatttattacaccacctttgccctctaaagtccactgaaatcatatgttgaaggatatataaactcccactgcctgtgttagacagaaaaagaaaaacctcagaaacctggatatgtagttaaatgactacttccaatataactgttaatgcaactggaagagtccttgtcaaatggatataaaaagctgaaaatcccatttcttttcaagttttccgattagttacatggctaaggtatgtcaagagttatctttcaaatgctggtccagtgtgctttaggaaaaccctggatttggagagtcgatatctttctggttcatagctgatgtagttttatgacttggggcagaattttcacctctgaaacactttcttctgagaagtgaggaggttgcagaattaggatcaaagtttccagcaccaaagctcttattaattggagcgcggaaaagggacacatcactacctgccagccagccgtggcttgttgaaacttttcaaattgctagagaagagagtttactgagagagtttctgagcttagggctcagtagctaccaaagcatcactgttaaatcagcccactttcaagaatattcagtactgaaatagtactttagcaaaaattttcaccagtgcacttcaggttccgagtagaagataactgtcatggttctttagctaaatttcttctctctctctctctctctctctctctctgtgtctctctctcacacacactctctctctctctctctctctctctctctctctctctctctctctctgtgtctctctctcacacacacacacacatgtggtgggttttatttttacacttatgttgttttaatatcgcctacctttatctgatcttctgaattattgtttagtcgattatgttcaatgaggcatattaatgttttccttgtgcttctttgcagtgttttccctccttgttaagtagtagattgccaaaaacaaatacctatacaatgggactttaaactttacaaaataaagccactactgtttgtgctattataaggaactgcatggaagatgttttagacaagaagtgtgcagtatccttatcctgaatgacctctgactttaaattttgaagaaacattttgtaacctagggcactgtccccagaatcaccgtttctctccatgaactgttctcagagctgttggcacaaagcctgggtcagccctatagaagcagactctgaaagtggggactatggtggtgacctacctttcaatttctttattatgggtgaggtttataggccatgactattgcatgtcaaagccactgtcttacttttagagtcgatgttaaatactgctgctgtttttgtataacttggctaatatgtttagacaccactgggttccaaatactggaaagccagcaaactgaattaatcgattttcctctaacaagattgtccggtagaaatggatactgccacaccacactgtgagctgcttacaacttaaataacacactggtgatgaacttatctttgaaaggggaattagaaactctgtggctgaagagtaccaaagggagcaggaggtgggaggtgggaggctgtggcagagttggagtctccggagggctcattagacgaaaattaagtgaggaagtcctgccccactctcccgtttttttcaacttataatggcttattcatttacaatgaattccttcagactcactccaaagtgcattctgtgcttcggggtttgaccgcaagcaagtggttctgcagctggaactggggtagcattttcaccaacagaaatgatacacgtcctctgcgcatctccaggggagaaaggaccttggcgctcacaccctggcatgcctagtctgaggtctccgggttttccgtggctatttattcccaattggacacaattcaaagtgtgaacttagatgtttgcaggtctttttgctttgggccatagatattctggagctgataataacggtagctgaggtttgctcacacctttctttcaagaggtacctgtgtacccagttatatacccagggctacagtaaattgagagggtagaaagcagctcctatacaaagcttcctgacccgaattgtgctcctttgtcatttactgtagaatgtacattatttggtggggattccatatccctgtttgtacctttaataataaggtttcggtccttgacataacatttccagagacgacaataaattaaaggagaattttcactgaaaaataaagtgaaaataatagtaaacccaaccaaaaccagaacccaaaaaacctgtccagatctaggcacatatataattatattttcaacatagtcaagaagaccaaacattctctcaggaaatgtactgagttatagaaagaatcactatattctatttgagagtagacactcaacatctgaggcaaatagaggaggctctagaatactaacatgactctaaaatgtttattaagagattatgtgcaattattaaaacacatttttttttctgaactggtatcagatggtatgttagcaagtagatttgagtcaaagaatttgcataattagtaaaatctctgatgagatccatggtacttagttgtaactaaaaaagaaaaggagaatttgaatgcatattgaatttgtgctgaagtgtagagtgcttttgagtgcgtttaccacacatctttttatataacaagaaagggaaattcagattataaaggaaacatgtagaacttgtcctcccctttaaaattacatctttctttccattgaaataacgggagcattaggactgggataatgacggcagatgcattctctttaaagatgtacacctgggagaggctggggtttgatatttgcagtattaggagagcttccttcttaatcattttatttgtttggatgaatgagagactaaagaattaaaattgtctgtttatatatttatttgttacattctttcaaaacagccaactgtcagccatgttgccttgtgtggtttaatctcattacacagttctctgtgactaaagccttaaactaacagttcataatgggattacacgggcttgcttattttctgccattttccaaacaaggttactcagggataattccctgccctgcttcttatgttattttatttgtctgccttaaagtcttttcactgaagtttttgtctcaccttttctccttctagtattcattttaagattttaaagttaaagttctctcttctttcctccctcccttttctcttcccacctttcttctccttctctctctagatggctatagaagcttattataatgtcatcaaggattacatgtgtgtattgaacaagcagaggaaagctttatgacaagaaagctgaataaggattctttagaacctcagcaatagtaggtaataggaaaagattgacatccaaacctccaaccaagccatggattcaacttcatggatacctgaaaatttcttctgtaatggaagtaatttagcatatatgtagaaaataaagcagactgacacacaagagtcttcagcagagcattcatcagagatactctgttcacaatatgaatcctcctaatcaaagattaaattaatcacagccctgcatcatgcaattaaaattccatatataaattagcctaatataaatgcccaagtatacattaattctcctttcacaaacaccttcaaagatggtgtgagcaaaatatagtgttgtttagtcgctgcacagtttagttgaggagaaaaggactcattacctttcagttgtagtcagtttctaaagttttataatgaagatcttgggaattaatttgtgtaaaatatttcaatatttgttggcagatgggagcatattttcttaatgaaacataagtagagttctttgccttttaaattctatggtgcaaacgcacctcttcctcttgttttttttttttttttattttttaaacaaaatccttttgttttattaggtgttccatggtagtataacacagacatcatttggtttttgttgttgctgttttataaaccacaattatttttcaactaagacagtggtgtaaaaataaaactatatatactaaagtctggctacacacgtgatgagctttaccctgagagcccccacttcacccccatcctgacagtgtgtgcagggtgagtgtcattttgttgttgttgttgttgttttgttttgttttctgtctagatatttcaaacaacctaacatgagatagaaaagccttataagctcagaaaatctaggggaaaattaaatttcaagtctgttttactagaagaataatctcattttaagcaacagtattgcatgtaaaggaaactatagagtctaaatgcatgacctgcatagagatcatgtcacctcttagagaccatgtcacctcatatttgtcaccatttctcttcctattagagtgagttcactagttgtcttccttctgttctagctgacttttatttttctcctgtgaaacactgatgtgaatagttttgagaatcagaagctagctagcaatttcagaattattaagatcacatctgtggtcggggactaaatggcaggcttactgatcactgtcatgagaatgatgaaacattagggcaagaaacaacattaatcctagtatcataggacacagttttggaaaattcactgtaactgatcaataaactcccctgatggcagtcctggtatgaagttatggctgtgttgatcagatcagaacctgtgtcatccaatgaaaacaagaggtagattcaaaaccgtaacttggggtgagaaggacttacagaatgtggcaatatggagtatacacattatacacaggttcagagatagaaaggtaggcatgcaatgcctttgcataagttaaaacatgtgagaaacttttcttcattatttagatattagaatagaagtaggctatggctgctggattgaatgattagtgcactcatgttgtcaatcaagaactatggaaattcctctgtacctcttatctacagtctttgattttatttgtttattactgactatgtatctgctattacgaaagtaagtcataaaagccacaattcctggatccactatatccaacaactccagaaatttgcactctccctttcgtatttcaccattttctctttctagatgtcatctgtatacaaagcaacttggtattgttcagtatgaagtaaataaatgaccaaacatacttactctactcccagcaaagcatctcgagagagccttcattatagcttccattgattcatttcccatccactttccgaggctcccattatgacctttatcaccgcctaatcaagtgcttcctctcaggaccatcagttatgatatatgctacaacctaatgtcaatctccaggcgacctcttgcctcatagcctactaatccctaaggcatcagtaacattctcttnnnnnnnnnnnnnnnnnnnntatggctgctggattgaatgattagtgcactcatgttgtcaatcaagaaactatggaaattcctctgtacctcttatctacagtctttgattttatttgtttattactgactatgtatctgctattacgaaagtaagtcataaaagccacaattcctggatccactatatccaacaactccagaaatttgcactctccctttcgtatttcaccattttctctttctagatgtcatctgtatacaaagcaacttggtattgttcagtatgaagtaaataaatgaccaaacatacttactctactcccagcaaagcatctcgagagagccttcattatagcttccattgattcatttcccatccactttccgaggctcccattatgacctttatcaccgcctaatcaagtgcttcctctcaggaccatcagttatgatatatgctacaacctaatgtcaatctccaggcgacctcttgcctcatagcctactaatccctaaggcatcagtaacattctctttggaaaacttccttcactgtaaatttggctagtggtagggtcaatagaacttttaagatgatgatcattaaaaaatgaagcacagttccaaaaatgcaaggtgatgacacaaagtgccaatcaaatgcaaagctggtttgctgaatcaggctaacggtggcatttattgttttctaaatagacttctatggagaagagacttgtgtatacacactggaggacagatgcaattctccctgcttagttaattcttactatagctttagaaagaactagcaaggagctagggcctgcacaggactgatgacattgcaggaaggcacaatgcagcatcgttcttatgattatctggagctgaccatggtacacatcttaaagtaatccccatttggcttttaagatgccagtgttatgaaatgttccaaggattcttagagatagcctcttgccaatatttcaggaaaatatcagtggagaagtgcctgtaatatcatagtggtttttaattgggtgatattacctcaaaatgttgccgctatttgattgtttcattatatctttgtgttgtgctggagttcagggtccaatcataccagggtctaatcataccaagaccttccttcacctgccacctcctggcatttatggttacctatattcagcccctactggaaagctcaatattctacacaggtttgtcttgtgaagaatgagtaataacaaaaaccactgaatgcagttcagtggtatagttttccaagcattatttaatgtttttaatgtgtaacatattatttaattgtatgtttaccttacacattctcaatactaaaatggtagccacagggttgactagtgaagacagagagaacaaagaaaaaaaagaaaggaaagaaaaagcttagggggaaggtgaataaatgcatataaagctggctcatttaataagtggtctccaaaatgaataggctctagaaaatagcatcgcagtgtccagccagtggctcttccttggccctcagccagaccatattcttgagttatattgtgctgttctttctgatactcagccttactaattaaaggaatcttatcccagaaaaaaaaaatgttaatcatattttggaccctattctaacaacttgatatctggccaatttcggtaaaacaagaaagctcctctgtggcttggtgtgccaggctttgatgtgattttttgggctagggctatgttttagtaatcttgtcacatgtcacattgggttgaaatagaagtatgtccggtgacttgttttttcaactcaatgcaaattagtttatgctttgaaatttgctgatcttctcacctcaattgggaaattgtctgactgtattgattggccaaaggaaggacttgctgaggtcaagtacattttgggtgcttataaaattgtgctcaatcatactactttggaaaatgagccctctgacaacagcatgatgctcaggaaagttgattctcctctagccattagccctgtctctctctaggaagcttttcctcatatatgaagcctttctgacggtataatttcccataatatctacccatagccttttctatgtaacttccattcattgtcagtgtaggcttcaccatttcttcagatacattgcccaaaattcttagtctatactggtcattatcaaatctggtgagagggaagtatgagtttgagagagtatttcagtctgtaagtttataagcatgaggggtgatgttgttataaatcatgtctgttatttttaacaatatattgtgagttctaagaaaatatagtgtccgtttttagtcattactatatcttcagtacaaaatttaaacaatttaaaacaatttgaatgtataaatctaaaatattacactaagcattctttcatgggggaaattaggaaccaaggtgatactgccctcccccataaaatacaagaggacatttttatcttggtctataggggtatttatggcatctactccttaatagttcattctgatcacttttggtagctttctgagagcttacacgtaactaaaactgatctgaaggcattccttcctctcatgatttccagcatctgtgcactgaactcaggtaggttcttgtacaattctaggcaattattcttccagttagttatatcctcagcctcaagacacaaggccctcttgaactcttttccaaattacaaataattattcactgatctgagaagctcaccccgaataagtctctaaggatttggacattgggatcctacaaagaaattctgttctaactgtatacacttagaactgttatcttcaaggcctgaaatctctgagttctagatgtgcgtatatgattttatattccctcctcttgcttcttctctcagccaaagatcaatagacctatatttttgtattatcattgacacatgattttgttacatgtttttgtaggctgcctgtcttctttgctatattgtttatacttctaaaagtatctgattgattgcacttcttgcaactaagtttaatggtctccaagtttaatggtttcccttgcccttttcaattctaaagtttaactgagatggatttcagtttcactcccgggaatcatttctgccctatgatggtttctttatctctgatcaagattttttttcttgaagattactataatattttaaatagctggaagttagtattcattctatcattatacctaaatgtataatgaaaaaacactgtggtgtgaggaccaaaacttgcttttatttttaagttttccgtagctagtatttaagcatatatttgagagcttgcctcatttggtgattgtcagtaggatgctttcattctggttattgtaaataacttctcttctccatcaccttaaggcatggctagtagcagtaggcacaaggactagtaacatggtaataagaaaaatgagctacttaaaatattcaagttcttccttcttgctatagagatgccagtgtttgaatcttagctttgagttataagttattagattgtccaactaagtaactgtataagctcaggtcagaccaggccattttaaatgccttaaaatatttatttgtgccaggcgtggtggcccatgcctttaatcctagcacttggaaggcagaagtaggaagatttctgagttcgaggccagcctgttctacaaagtgagctccaagacagccagggcaatacagagataccctgtctcaaaaaaccaaatatatatttaaaaaaccaaatgtatatatatatatatatatgtaaaatgatggagacaattcagagaaaccacaatgcaaacaagcctaagagaagcgattgccctgtggtgttttagaaatacataaatcttacatcatctgcaacaatatttactggttttactgtaaaaacttagcttcaaaagaaagccctactcaagatttcaataagtgtctctcccacatgactcctgagaacagaactacacgttccaactaaagatacagcaccagaatcaacaatgcagatctcagatgtgagagatggcataactactaagaagtatacaaaaagaagttcagttatagggcacttagtgagattggaacatgaggatgagaaatagaagagcctccattaattctagctcaaccctgactctcaggttacctctctgtcacacaataaatggagtatatacatgtggcttacaacaattgtactgtgacaaggtgagactgtgacagcccttgtctatgtatgccagctgtggagatgaaattatgctatacagtaagcctggtttttttgtttttgtttgtttgtttttgatgttttgttttgttcttgcttttgttttcgttgtttgttgttgctgttgttgtattcattttttggggggaagagaccattactttggaataaacatcgcaataaataccttctttaattattattgatgaccataagcttgcaggtattatcagagcagtgagtgagcttccaggccacaaatatcatagattgctcattgtttgctctgggtctctcagtagcaatacattttaatgggttaggcacttttaaagcatgttactgtttgccaaacactttttcttttggcaggcatctgtaacaaagtctaatgcattatgcatattattttcacagtatttcattgtattagcacgtgtagtatttgtatggaatatttgtaaattcattaccaaggtattatcatattaatgactgtggttaaaaagtattagaaaaaaatattaatattcatagacactgtacattgcatggtgaagtgagaataacataatttaaattccagaaaaaaattagcatgcatatgtgaaaaatagcttacagtagtatgcagcgaacgtgaaaaaaataactgaattactttgatgtttctatgaaaactgtatgttcaacttgaattgaaatggcaatcaccatcacagattaaatgataatgagacactggttttgttcaacagtataatttactagtagagagtttgatttttatttgatctgtctgaatatattactatactaatttatattaatttatctttatgtactaatctgccaaattattctttctcttttacaagttttatactaacctgtgtggttatagtaactacacatgtggatctgcttgtctgtatgcccttaatgtatgtgtaagtacacaaggaggtcagaggtcagagatgatgtcagatgctatggaactagggttaaatgcgcatgtgcacttttttatatgagtgttgagaaccaaactttgtccctttgaaagagcagtgctgatcactctgaagcatagactcatcactctaacaccagaactataatttcttatttccctttggccttgaggagtgcttaaccctttcatctctggtccctcagatagaagaaataatataccgtggcataatttgatcaagttacctgtcttgtatgaagctacacaagaaattccattctgcagtgagctgtatggttcagctctatagagagtctcatgtcttcccttctcttattcctcccatgagggaatccaaggaaattaataagggatttgtttcctttttcagtgaaatttttattatttccttgggttactagaaccttgacttgtctccaagtttaatgaacaatgtcttgagaactcttccttttagaaactgtttcacaatacaatacattctcactgtcagaagtgttatagctattattcttttcactgggtttgattcagataattcctctgtccattaaactaaaagaattccttcaactacaagtttgggctgattcacaacagtctttgaagcaaggcaatttgttctcagttttactttttaaaaaaagtgcacaaccataactcaacaccgcatgttctatacaacaagtggttggaaaaattccattttctttcaaaaatataaattcatagacatccatccatatatgagtaaacagaagtaaacagtaccctttatgtggcatgccataaaactgaactaaattagaagaacaataacataaaataaaatagaaccaacatgcttaaacaaaacgactcctttcttcttcttcttcttctctctctctctctctctctcttttttacatataactgagttgtccacattttccaatagcataaaaattatatcttcatcccatctcattaatagttgtgtccagtgggaatttttcttctgtatttttacagagtgcttccttcttgactcatagtttattctgaatatgaacataatcaatgaacacttggccttgtttttcctggtttctctactaattcttggttagacacagtttgcctccatacaaagaccaccgcaggcttcaggttcttttatctcaaatcccaaactgatatactgggtacaaatctaccattctgcaagcaattcttgttccctttcttctcaatatttttaacttgaaaaatatatgaattttaagaatgctctttagggaacacttccctcagactattttcctttgaggaaaaagatggtaaatagtgggaactaaaaatgactagttagccaacttgctcaaattagtgtgttttataaaactcttaaatagatattttgccaagtgaggaaagggaggctttcttgtctggttgaagccttattaatgggggaatcgttacttccagacagcttggcataatctgtttgtttataacttaagaggtgtatgacatcatctcctggcctctgtgaatacccttcttgtgtgtgtttttatatgtgtgtatgtgtgtgtatgtgtgtttatgtatgtgtgtatgtgtgtatatgcatgtgtgtatgtgtgtgtgtgtttatgtatgtgtgtgtatgtgtatatgcatgtgtgtgtgtggtgggttttgtttcaaaaaagagaatgaacataaagttgagtaggtaggcaggtgatcaagtagaaggactaatgtgaccaaaatgtattctatgaaaaaatttcttaaataagaaataaaataataaataaatacaataaaatctttaaaagaataaaagatatatctgaagttaaaggtttagccacgaacatttcttacaggcaaaattttctatatgtggactttagaattactgaaaatcagatacatttccctctaggctaacacttagaggctgaaaaatgaagatgagaagaaattctgggatatttgaaacatgtaaattttacaatgattcctaattcaccataactatcaatatttcttgaaacaagctcaccacctgttgagcaccacagcttccaatcctaatgctcacacaacacaatggagagtgggaggccaactgaggctaatagcattacccaattttatagtggaaagtgaatcaaaacacagtaacctacctgactttacttcttctaaaaatttcttatttttcttacaatagaatgtctaaaaatcttaattatctataagataattatagtttcgatccttaagagctcagaaagcaatgtctacttcttaactggcgatttatttttgcaaaacacacagaaacaggcacggaaaagaaacagattagacgcacgtatggccctcatctatgcttgtctccctgtagaggttgaaatggggtcaaatcatttagatttcatgtacatgtcccctctccatgactaaggacatcctgagagtttgaaaactagaggaagaactttccctgccaggacccacctctaggaatagctaatattttagtcctatgtacttgaacaagaataaaacatattttgggagctctcagtgtacagaaaaaatgcatagaatgaaaatatgatctgcaggaaaatataatttacttggttttctaacatattttcaaccgtattagaaaagaagaccatggaagaagtccctacagagaaataattcacagtaacgtaggataagcatccccaggaaataatcacttatacaagactgtgtaatacaagggcaggttgtgtctgtcttgactttgctaggagaatatgcctgttgtgcatactgtgagtagcagtgtctaccattgtctcagactcatgggctgcttcagtattaatttccagagctgtgtttacatctaaaagccgtgagctagttaaggggaaatatctattgaaaagaaagagtgaatattgacagaattggactaagagctttgtggaacagacagtgatacttgcattgatatcatgtgcagtggcatatttatgtaagaggcaacttgattaaaagaaaacattatttcctattttttggtttgtttgtttgttcttaaaggagtttagagaatgtccttttgttatttgcttgcttaagtgaggcattattctgcacaccgactttcatttgctgtgaactgtcttgggacattttatctgatgattttctgttggtgtttcagatggaatcctgagttgatcagaccttgatttaaattcaaatgggcatcagtatgtttatcacatagggttttgactctaagaagtttatttaggcattaaaactgaaaatgcaaatgtcactgcttcctaagttaaaaaaaaatcacaacttttttttttctaaagaatatagtatgttttggggtatttttctattctttcagtagtttttctattctttcagtagtttttcttttcttttgttaaaaaggggaaaaataatattactgcctactaaaggttcgtatccagaacggcagcctataaagtctcttcgttctttgaaaaatatgcttgatctcattctatatctctgcatctgaaaataaactaacaacacacataaaattaaataaatgaaaagccattgggctgaaaagtattcctagggggggagacaactttacctttccttctttcaaaggggaaagcgacacattgccagggcagcatgaacattacctggcatgaagacagtagtagagtggttttgtgacttacgtttctctcttccctttacactgtgttacatctcaggcagaggaggagtggagggctccgtgaatacctgagaaatagttgtagctgaggtagaatgacctcagtttgccatttggacacaacagcaaggtcacaatactagatagatgacccgtaactataacatactttcctgttagtgaaaatcttccatttctccacgtcttttaagctctcatggattttacttgagaagccatgtactggtagtttgggtgtccttccagattttccaaggctacataagaaagggggaaagaggccctgcctttacagacagagtaaaacaggacatttagatttacacatctggatataattagcatgtaatccatttccacttccagacctttctcaagcttagtgtcctctttggtcacatgatagtgacccatcatatgatattgttctagcaccctagtaccttcctgaatgacccttgtcatgatcctgaaatgatatttgatggtgttttttttttttttacattagcatcagtgtaatttctatgttttacatgtgttcatttttaaaaacacaaaaaagaaactctttcttttcttctcataacacttgtgatatcgtgtgtgtgtgtgtgtgtgtgtgtgtgtgtgtgttttcccaaagggccaagcagtgttccaatcctttgggtatccaacagtttaattcaattctcacactgattactcggaattagcaaggatcctacaggttaagagctctgtgtgacaaggcttcctcctgcttttgatgttaaccacggaccccagctgaccactgcaaaacaggattcctaaaacttccttttaatgctcaacagcttgttaggcagcctccaaaaattcaaagaaatatttcctcatgtttaccagtatgatataaagaacattatgaccatccagaagaaggtagatgaccatccagaagaaggtagacataggttgaggtctacaagtatcccaaacacaagagcttccgtttctatggtgatgggatgcaccagcttctcatgacatatttttgtttacaaaccaggtagctcatcaaatctagttgtttaaatacagaaaaaagtgaatgaggtattccttaaggtacaattaaaaaaataataataatgggttgctaaatatgattgtaaaattactggattaaaacaaaaagtatttatattctaagtcttaatgaaaaaaagcaaaatatagtcataggcatatcaaaatgttaagaaaagatgctagctttccccagtaattcatgggataaaaagagaaagaaaagtaaatgagagaagggagagggcaggggggaagaggacagggggagtaggggaagaaaataaaggggaagaaaggaaaagaaccaagtgttttgtaagcctcggtcctccctcctgccttacatttcctggaatcattagatggaatcaaatttccaaaattgtaggcatttgtttctgctttataccagcccttttttccctaggtgattcaccccaagtgaactgcaggaatgtgattcatcataaatagtaaagatatcttcattattaaaaaaaatatatgaggttttgaaatttgtgtatcaaaaataagtaagaaataccaatataggccctttgttctcaatcaccaaaggttatgctacactattatgtgtcaatagtcacagaggccaacaggaactcattctgaacttgccaggtactggggtctcttattttgacaaggatagggaggattttcaagtttctgtctatgatttcttagtctggccatggttgtttcttgactcactgccttcagccacagcctactaacctttcatttatgcttctgatgcaactgctgcttcatgcatttgtgcaggtaggtgtgtgtgtgtgtgtgtgtgtgtgtgtgtgtagagtattcttcaacctaccctgcttctaacctagctatacccatctaagattaaattttctgctcagggacttactttacctctgtgctgtgaccttagttagcacagtggcatatctagttctgcaggcaggcttcatgctgaggttgcaagcatagatatcttttcagtaagtctggaacctggtggcaaatgtaatacactcctcgcttgttccatcattactacctgaacacctacctactctggcgagagctttactttgcttctattcattttcttcttcaatcgtgcaaaaaaaagagcatgaaagaagtaaaacctgaattaactatatctgtgttcatgaaattcttatggtaggggaaaataattcttcataaatgttgtggtcattttttccaagtattatttttcatgtatttatatagtaaagactattcatactcctgcaatgtcagagattgttggttatatagagatgagaatccctatgaaaatctaaatattaggaaaggatatcaccaaggacttcaagcctgtaagaagctattaagtacagggaatgagtgagtgttgatagttgcagagttgatgctggtatagtgtctatgtgtatagtctctctccctctccctctccctctccctctccnnnnnnnnnnnnnnnnnnnnnnnnnnnnnnnnnnnnnnnnnnnnnnnnttatttgaaacaggttatgtcactgaccctgtatctcttctatcttagctagcctagctggccagtgagcagccacaaaccaccaacacttgggttgtcagtcatgctgatgcccacctgcattttcctgtgtgttgctgattcaaccgcagatcctcatgcttaggaagcatcccacacactgagctgtcaccaagctggtggaagctttcataacatgtagatctcaggtctgggttttgagttatgaggaggaatggcaagagtgagtccatcacagaggtgatatattcacacattctgaatgaagaatgtctgtgctcaacagtgaactaggtgctattccgcaaccattggaaagaacgcagctccttgggtgctttctctagctcctccactgggagccctgtgttccatccaatagctgtgagcatccacttctttgtttgccaggcactgacatagcctcacaagagacagctctatcagggtcctttcagcaaaatcttactggtgtatgcaatggtgtcagcgtttggaggctgaatatgggatggaatcctgggtatgacagtctctagatggaccatcctagaaagtacccaaggaactaaaggggtctgcaaccctataggtgaaacaacaatatgaactaaccaataccccagagctcatgtctctagctgcatatgtatcagaagatgatctagtcggccatcattgggaagagagaccccttggtcttgcaaactttatatgcctcagttcaagggaacaccagggccaagaagtgggagtgggtgggtgggggagaaaagggggagggccctgtgggattttggtatagcatttgaaatttaaatgaagaaaacacctaataataataataataataataataataaagaacgcagcaaaaggaaccaaaggaaacaaaccagaacaaaccaaccaagcaaccaagcaacagcaacacaatccaaacaaccaaacaaaaattctcttcagaagagacttatgtctctatggatggcttatcagttgaaagcattgagactcacctagattaaatccactgtccagagtcacaagtcaatggcagtctctctctctctctctctctctctctctctctctctctctctctctctgtgtgtgtgtgtgtgtgtgtgtgtgcctttagagacaaaaaggtcaaagatgcttgtcttccttactttcacccttaccaaacacccacagaaatgactgtgctctgtaaaaatttcataacaaacatatctggggccctcgatatgggtcactctgtatacggaggagatcattgggtcctagatctgctaaggctgtacggaaatcctgctgcaatcactctgcctgtacccataagtgagtctgaacttatgctcagttgctaatgtgagtttctggctgttacgaaagttaaaggaaagagtatgagaaaaaaaaaagcgaataaacttgaaaatcaataaccgcaagggcacaaataaagtaattttaagagaagattcattaggaattgtaacttcaggaaaacaggaaaacaaattccttggtgggaaggagacctctgtcgtgcaattttgctggcctttgtgagatcagtgtccataaaagaagatttgaatagttgttcttgaggctgcttttctgaatgcttctagttctacatcttaaaaccaaattaaagaacaagcagatgccttgggtcatgcttctagtttgtagaacccatcatctctcatttcccagcatcgttttatacatcacacaagacttcattgagactttgcctctccttcctctccactcttcaccccatcttccctcccctcccctgcctcatcacccctctatcattttgattttgattttctagacattgtatttaagatattggtgtctggccctttcagagatgaaccagagggtgtagaaactgatctacagatatccaagtaaacactctgtaccaatggggtattgatgtaggaaattatatcccattttctcaaaaatacatgtttttctttgacgttcctgtcttcaccaacattggaatttcaatcataattgtgggaacaaaccagcaggaaggatgaggacagaaattcgtaacaacatcactaaccccatagtagagagtacaggccagcagagatttgtctttcttagacatatatgacagacaatggcctcctaagagctgctctgatacaacgtccaaggagctagtctgggtgtattttctgtgaatatctgattatatatcatagcagaagagtattgattgataaagatacctcttgaccctgtaagtctttagccttataaatttggatgtgagaatccaataaaactgataaggtaagccatcaccaggatgttcccactgtgcaggggcaagtagagaaagacgattcaatgttataatggtacaaccgttgaaaactggaactcaggaggataataggctataagataataatgttcctgtagctatttatacaactttaaattgaaggatatatgtgagttttattcatgtcaacaaatccgagtatcaattgttgtaagaattaaataaatacataaatcaatagataaataaataaagcttctctaaacagtaaattgagcccaacttccagctcttagactgcttttgataaatgtttgtagctagatccttagttacatcagtagtagatatagcttccattgccataggcctggctccttctcacagctgtctgatttcttttagagtctagctatctccctatcctatcatatagaaaaggtatatttcattttgctcaagaaatatgtacataattcttggaatgttttactaatctatttagaatcagcagagcagatttgacaagagtattttcttccaaatactaaactaatgaaattatgtatttaaaaggttcacagatgtgcaaggtcgtcaggggaactatcgacgtgttcaaggagatgcattgcagaggttaggatgtggtatcagttggtatgagactgagaatacatgacaaacacaagttcatggggtttatcacttatgctataaaatacaataatcacaaatttaataagatgtgcagctgaaagttctactgaatatcaaaaggaatcatagcaattcattttcactgtgtcatttcaatgaagtagaagataattacctattcattccagataagaattcttttttaccaaaattaaaaaatgcaagaaatataaaggcaatatgatatagtacagtaaagtgtataatactatagtattaaaaattgtatattatccccaacctaagttaacctttgtctttttttcagtaatttctgttgtgaaaatgaagagattttaaaaatcttaaaacccatgtagaaccatcctatttttatcaactccatgacttccgtcaaactctaacattaatttccagctaatatatgcatatctattagatctattttgtccctctccacatatgcatacatatattatgttattcatctacttatttttatctaaacttttatgtttaaaagtatacttgggtgaatctagaatgtaatatcctatcatataataaatacatttcatttagctattctctaagtaccaaatatggctgctttgattatatttaaataaaacttcagaaggaagtactgtttcccacagcatcccacaaatgctatagaacatcaattctggttcaacactaaggatatagaatggagctcaaggccttcaaggtgcaaggataacaaaatgcaggaccattttcttccccagcaatgcaaagccaaacgataaggagaaggcacctggagaatggccttgcttaatgtggagaacagaagtaggggatgagaaatatgaaaggcacatcaaaaaatgcccctgtgggggagacaacagcatcataaaaggtgatgagaacacaactcagctccagcagagagacaggctccttcctgtccaccaaaggaaagagtcttccgcaattacatacagcttgtcagtgcttgggagacaggaagcaggagtctaacctactgtgttcagacttccatctaacccatcagctgttacagaggcttgttgttgttgtagtgtgtgggtaattttccctctgtaaatacatgctcatttcccagtggaggaaaagtcttgaaagaaagattggaatactctcaccacacctacagtggaataccatggacaaataatgagaagcttggagacaagaataacttgtgtggaataaggtggaccacttaagcatggaaaatcactttctagcttgtaagagatatctagaaaagatatgccactcctcagaatgctctaatactcttagaatttcctcagtgtcctcaaggtgacagatgtgtcccactgcctttggtataagagttggttaagcgagccttctgacactgagccaatttgaatgttcagcctcactttggagtagggaatcattcaatattctcttcactgctgtccctagagatacacaaaggcccatagtgcctttcaataaccctgcaagaaatttatatgcttacatacatgcatatatatatacatacatataaacacacacgcatacatacatacgcacacatatatgtttgtgtgtttgtgtgtatgtgtgtgtgtaagagagaggagagagaagaagttttgttagtttgaatagagtctttctaattttcatggtggcttcattgaagaaaatggcagtagaggggtggttatgtaaatgtaggtggggcttttatgatgttcacaacacacaaaaactcacaagaacacacaagataaaagtcaaaccctttccccctctctgaagtagctaaggttctgaagacaatgatttaacagggaacagtactgaagggcaatggacatggttcagaagatagagttttcagaaacatcactcccacgtaaatacaaaagaacctgcttaattcattcagagagattttaattaatatcctagatagtgaaacacccttttaatgaaatgaactggtaccaatttccccaaatatacatagggtaaatcatgtgaaaaatcacaaatattcattttgggtcaaaaaccgagttcgattaggaatataaataatgtttagagatattcactaagattttgcttataattgccccccccccttttcatttttccaatggcatgtttaaggacgtgatccttaaacaagtctgaaattttgtttgtttgtttttgcattaaaaccctttcgacaataaagaattatgccatgactaacttagtcttcttggtagtttaagcaatatcagtgcatttaaaatcaaatagactaaatagaataataatgattacactatatgataaatgttactattgtaccacaataaacaacagtgggaaaacagagatttggggattgcaaatgtttgccaaatgtaaggataggatataatagctggggagacacaggagacacagcaacgagagagtactcaacagacatgttttatgatagtttacttaacatttccccatgtgtctctcactctcagtctttcacattcactgttgatggaatatagatgctgaccacgtatttatgactctcagtcccagactaaaaatattttaattgtatttttttaattcatagattcctgttagtcattttcacactgaaacacacattctcttcttcttggaaccttctcaatgttcatggtgtgtgtgtgtgtgtgtgtgtgtgtgtgtgtgtgtgtgtgtgtgtgtgtgtatgtgtgtgtgtgtgtgtgtgtgtgtgtgtgtgtgtgtgtgtgtgtgagtgtgtgtgtgtgtgtgtgtgtgtgcacttgtgctcatgtgcatgtgagcacatatgtatcagagagagagagagagagagagagagagagagagagagagagagagagagagagagagaatttagtttcttgactgagcatgggtaaatggtattttttttccttccaaaacattggtcagatggtcagactgtactagggccatgctaaggtgtcattcaaatcactcctaagtccttatgtcacacacaaaaatatccctatttgtaagtaacaggttttgtaactttgacaagtggatattggtttcgggagtgggatatacaattacacatccacctcttctttgccagttaaataggagaaggagcagcacaagactgcagaatctattctgcagcaataatagttcgcacaaagatttgaaaatgattcttgttgcttcaaggataaggacacctcttcccacaaaggactccattcaactacttcattcaaacctcttattgtttgcctcttgctgctataaatcaaactgcctggcctcaaatcccctatgcattcctacaaaaagagatttgttctgctgaatggtagatctgaggtttgcctcatggcaaatgtgcctcttgcttcaggtggttgaatccgaattcttttcccttaccccagccatcccctccacctttaagcaagcatccaacttttatttatgttcgttttttgaagagaggagaggaaaagaacacagacccagaacagtaaattaaagttcattcaagcacagttgttgctgatggaaaacactgttctgcctggttgaaatgagacgccgggggcttgttaagcctgcatgtcatggttgaacaccaggagtcaggctttcttaaggggaggtgagacctatcttatttaatgctttgacaaattaataattgagctggagagcatctcactttcattgcaaatggagaggcctaagcggaatcattgccaaatgttttagtctttccatagttggttctatgaccttgaacaaatggacaaatattttatatcacttagttgactgttgttttttttttctgaacttttgatgcaatgatctggacattgtttaacttcacctgttattgaaaaccttcaaaacagaaaaatgactatttttatttatgcaatgttgaaaataatatctataagaagattaaataaactgatattataaggacaggactcttattacaagaaatgtagccacatgttttctccagaaagagctaaataaaagtatctaatttatactttgaagaaaaaaaaacccggaaaagtaactaagccattgtaaaaatggaaatattacattttaaaaaaatcattctgcaagtgctttcaataatataattttctcaactctgtagataacagtagtatctgtggcccctgagatcctttagctagtgagagacttttaaatgttatgcaggtcacctccctgcctgaaccctcaacttagtattcaaatagatatgtgtggtatgatattctgaatcattgtgcttacttctcttacacttacctattgcaatcttacccagcaaggtattgtaattaggagatggaaacaatgaaatataatggggtcaaaggccacatgaacagaatgagtggctctattaaaaacaatggaacaaaacaaaacaaaaccatggcaagtcaagtggctcagaggttaaacctcctgccactcatgcatacctatggcctgggttctatctccagacttcatggcagaaagagagaatggacttctaagagtttgtcttccaacctccacatagacattatgacacatgcatgtatgtattcatatatatatatatacatgcatacatacatacatacacacataagtacataataagtaaatacataaaaactcgaagctgtcccctgtcctccactatgtggagactttgtgaaaatcatctttgcttatgaatcaaaagtgatcccttttcaaacattagctcttccttcaccttgaactaggaatttccatccataagctatgggaaaaaaaccttatgtttgtttatatggtacccagtctcttgcattttgttacagtagcctaaatatactaagaatattgacaaaagaaattgcatgtatcatattacatattctattctactgtaccatgtaacacattgtccattgaatgcattcatacaaaatattacactttacattattcaaggatgctaaaaatgtaatatttaatatttccatcaattagttttttattgcctgagtgatacgctattaatttgatattaaaacatttgaagtggggtttatttgtcagaaagctgattttaagataccatatctacaaagaggtgaagtaaactgcagtcttgtcttatatcttgttatcctggtgtgtattacatagtactcacatttctcagtcagaaatttcccagtcacagattaggaaagaaacctaattagatttttctaaattttaatttcagatttttctcctaagtaaatcaaaatctgcttttgaccatatatatgctgccgccctgctgtggcacaatattcctgacccccccccccaaaaaaaaatatcacaaggctattcatcacttgacagacaggaatcacttagtgggaactgaagtgcacagagggacaagataagccccaaggctgtaataagtggtccatgttctcctataatctcccacatcataagctttctagagcctcctatcatagcaccatccatcagctgggaagcaaacagttaaaatacaaggccctggaagatatttcatctgcaaaccatcactatatcaatctgggatcacgttttgaattgctgtgtagagggaaacggaatattagctaaccgtgaaagaggagagacaaagaaatacagagctttgtataattttattgaccttgaagatgctatcgaggtgatccttatatacattgtatagaattcctccaacacatttcatgagtttatttatcttttatactctttgtacaagttccttcttttgtcatacctaaattgcacctgaaacttaatccaataactaatttaactatcctatgtgaaatgttccccatttatcgatcaatgtttacattcctcttaatgggattgtggtcttacctacttatgagatgcaaatgttggcatgccaaaattccacttcatcttttcttaatgcatattttcttctatttctagcacttctatattttcagaaatgtatagctcctttctgtgtaactgaagattacagagacgcggtttattccgttttctgggaacattcctccctttcactgagaggacccacccccaccatgttctgttggtaaacacacctcttgtgtttcctcagtccattcactgagaaatcttgctaccatttgcgatcgtgttgctgagagagttcatacactgaatcattaaaacttaggacactgaaagctgaagaagtagcagagtctatatagcccttgccacgagaacacaaattcaataatcttatagccacatgaaggttggatgcgttggtttgtgcttgaaatccagcaatggtgaggtaggagcagaaggattcttgggacccacaacacaaaccagccaaactagacggctttacaagttacttgctactgagaaaccctgtgtgtatgaccaccagcctccgcatatacatgtatataccgatcaacaaatatgtatgcttacaagaaatcataaataaatagaaaaacataccatggacagaaaaacagaaagaagaaagaaaggatgaaagaatatgcactgcccatgactgctctatcaatgcacagcgtccagaactccctcatccacacactgtaccatacgtttcctttaggtatttgctttcagtgatccgacaataattcagcttccatggagagaaaaaaaaaaaaaaacaggagaaatttgaggtggacattagggctgcattatatctctaggcagcctgagatttacaatcttaaactcaggatgtatctccaacttttatgtgtttgattagagtattttatgaataaggcttaaactttgatacttttctttattctaagttacaagtactaccattaaccccaggggtcccaaaatactggaaaaagtcacttgagaggcacacactaaacaacaaatcaatcctttctcttaaaaaaaaaatacaacaagatccatgtctgcttatgatgtctcagaaagaagtctttcctgtccttttcagtggtagcttccctctggaaaggcactggctacactagcattagatttgctctttcccataggtgctgatggaaaagctgcaatatagtggatttaaaaagtgacccagtactgtgcaaaaagatttaattcatgctgaggtaaaaagggtggggggggagggagagagagagagagagagagagagagagagagagagagagagagagagagagagagagagagagagagagaggaaggaaggaaggaaggaaggaagaagaaaatataaaaggcaaaggaaggaagaaagctgttctctgagcccaggcccaattcacagatctctcttctccataatgttccccagagtgtgtgaagcaagtgacagtttctctgtctatacttgtgctccaactgactggtaactttctccttctggcttcttctgattgttttttaagcaagcaagaaaagcctcattttgctggtgtggattatgctgctagatttcaccacacagtggtggctctatctcagtaatagctggaagcatttcccaatgtttttctctagaaagaagttgttgagggacacacaggagagggtcaaggtctcagtgtctgtgatcacagtatcatattaaatagtcaagattttattttaatcagcagggtatcacaatttctcacaaatacctgtcctgtgcctggagtgatgttaaactttcccttactacggtctgcctggatttttttaaaattctgatttagtaaggctaaattatagacaactggattgatgagcactgtggtggtaaactaagacatacatgctttagtccctgtcagctggagggactgagctgccattacacatttacacatttgtttctgcctgaggcagtggccactgcatgcctgggaactgtcttctttcttttccctggagtggccactgttttccaagcacataccgattatgtatggtaaccggttatgtatggtaacactatggaaacgtttaaatgccatgtctttagatcacagcttttacattgtgaaggataaacaagactgttcaccaaaatcccaatattttttaccccattcttatgtacttgtgattcttcctgacagaaaggactctagttttattttattattctttagtaattatttaattaaaacataaacatttatatcaatattataaaaagataccacacattcaggatgtttttatttattcactttacatactgctcattgcccctcctccctgtcactcccttccacagtccttcccccatttaccctccctttctcctctgagagggtgaaccctcccctctggctagtcccaaacatacacatcaagactgtgcgtgactagacacatcctcttacactgaggccagacaagacatcccagctagataggcatatcccacagataggcaacagccttgagatagtccctgctccagttgttcaggagtcacatgaaaaccaagctgcatatctgctatgtatgtgcagagggtatgcaacctatcagttgcagatttccattcattttcatagccttctgaccattccactgtctctccccacaacttatcctaaacattcacattcccctcccagtcccctttcctgcccagttcccttcctccatttgcctcctatgagtgttttatttcccattccaagtgagattcaagcattctcagttctgccttccttcttgcttagcttctttgggtctgcagagcatggcatagggatcctgtattttatggctaatatccacttataagtgagtacataccatgcatgtcattttgggtctgtgttacctcactcatgatgatattgtcaggttccttcaagattcttgtttttgaattctctgtttagctctgtaccccttttttcagttggggtttgggttgttggtgtcaaaattcttatacatttttggatattagtctctgtcagatgtagtgttggtgaagataatgtcccaatctgaaggctgctgttttgtccttgacactgtcctttgccttctagaagctcccatttatcagttgttgattttagagcctgagccattggtgttctgtttaagttgtctcctgtaacagtgatttcaaagcaattcctctctttctattctattagacttaatatgtctggttttactttgatgtctatgatccacttggacttgagttttgtgcagaaggatagatattgatcttcttgcatttttctacatgcagacatccagtgagattagcactatttggtgaacatgcaatcctttattccattgtatggttttctcttctttgtcaaaaatcaagtgtccatagatgtgtgggtttacttcaggatctttggttatgatcaatatctgatcagtgttctattgtcaatctgtctttgtctataccaataccatgtagtttttattactatggctctataatatggcttgaggtcagggagcatgatacctccttttattgttcagtatagtttttccaaacttgttttcatttgtttgtttgttttcttttggttggttgttttttccattgggtttctcggcttttttgttttgtttttcgttttgtttttgtttttccatatgcggttgagaattgctctctcagagtctgtaaagaaatctattggaattttgatggtaattgcagtgaatctgtagattactttttatacattggtcactttgactatgtcagtcctaccaatctgtactggctggttttgtgtgtcaacttgacactagctggagttatcacagagaaaggaacttcagttgaggaaatgcctccacgagattcagctgtatatcattttctcaattagtgatcaatgaggctgggcccattgtgggtggtgccatccctgggctatcattcttgtgttctataagaaagcaggccgagcaagacaggggaagcaagcaagcaagccagtaagtaacattcctccatagtctctgcatcagctcctgcttcttgacctgcttgagttcctttggtgatgaacagcaatgtggaagtataagctgaataaaccctttcctccccaacttgcttcttggtcatgatgtttgtgtaggaatagaaaccctgactaagacaaaatccatgaggatgggagatctcatccatcttccgatatcttcttcaatatatttcttcagtgacgtgaacgtctgtcatataggtatttgacttgctaggtagaatttcaccgatgtattttgtattatttatgactattgtaaagggtatagtttccataatttctttctagccaatttacaatttgagtaaagaagggttactgatttctctgagtcaattctgtatccggccttcagctgtaggagatctctagtagaattttgggatcgcttatgaaatatcatctcatcctcaggtgatacttcttcctttccaatttatatccccttgatttcctttagttgttttattgctctggctagaatttcaagtatcagcacttacttatgaatggggtacactccctctgattctgggactcacttattatgagtcagatgcgatccctctgtgacatacaatataagaggaagaaagaaagaactttcattgtcacaaagcaagctttaggtacaaatctacatagggagatgactgctgttgatctagactgtggtatatctacagtccactgagaaagacagcaagagtcattcttgaaatttcatttgatatgttaccattttctcaaggactctaggtagtgaagatatttgctgtttgaaaatagctgatagacttgccactattgtccgaatgggctcatcatttggggatgattggtattgctagctccaaaactgtgtaggaggattagaaacaattgccctccagcagccaggagagttagtcccttcttgtgccacaagggccagccagtgaggagaagctcctgccacagttcaaactttgtttcactgtgttttgcaacaactgtatgttgtgacttcccactgcatagttcttctgggcaaccgaaagcagtagctatgcttgtgatattctagctgacagtagggacgcagcctacacctagcactcaagagttccctttactaaaccatggctcgtttaaagggaccactaatcaggattgaaaacttatcttcagataatttttgatgttggaggaggctgcattatcttagtagtagctactggcaaggcacacattgtatttctgtaaacaaccaggaagaaaaacattgagtcacacacgtgggggaaaacatgtgaaaatagaaggaaggctagttggaaaggagggagacaggtatgggtgactggggtcaaatggtcaatataaaatgtctatatgcatggagatgtaataatgaagcatatttttaagtataattaataaaaatgaataaaacatataataagcccctttatccaggccttttgcacaaatagatgtctatgctacattaaaaaaatatataaacacttgtttatatttaaacagcaataacaaaagagtaggatttttttaattttgatttttattctttaatctttttttacagtccagtctttatccccctccaggtccacactcagactgttccacatcccatagctcctcccccaccatctccaagaggatgtccccaatccctacccttccccctcccagatctccccactacctggggcctcaagtctcttgggggttaggcacatcttttcactgagtcaaggcctagcagtcctctgctctatatgtgtttggggcctcatataagctgatacattctgcctgtttggtgccttagtgtctgagcaatcttgagagttcaggttagttgagactgctggttttcctatagggtcaccctcctcagcttccagcttttccctaattcaaccacagggatcagcagcttctgtccattgtttgggtgtaaacatctgcatctgactccttcagtaattcttttctatgacatgaaaatatgcaatcccttattgaggatagttatatagccgtgacaatgtactaaatttgattttatgctgactttataccacactgattttatacttcaaagtggtaaattttatggctttgccaataaatatatacatttaaaagcaaaggttaaaaagagaaggtgtgtttcatccccttcattctacaggggtggttctcaaccttcctaacgcttcgacccttttatgtaactgttcaggttgtggtgacccttagccataaaattatttttgccgtttcttcataactgcaattttgctactgtcatgaattaaaatgtacacatctgtgttttataatggttttaggtacccctgtgaaagaagggtcctttaaccctcaaatgggttgcaaactataggttgagaaccatatatttaaacatttttgattccagaagaatttaagtcaatagtttttattcaagttaatctgttgcttgcctttcagtaaaagtaactgactgttatttgacaagcttaagtgactacttaaaagcaaaaaaaaagaatgtatctggaatgaccatgttctagctcatggcaatcatacatagacatttggtgaatgtctagcatttcttcgtttgtccaaatctgatgtatccaccttctccaccaccagaataataaataaagaagtatagcagaaacagatgcgattcagtgacatgttaggatagcactgggtagttttaatcttcacagcactacagattaatcgaccctcatttggggtttaaaaaataacccactcacctttgtagaacattatgagccacagtatcacaatcttatctcccggggccttgtataaagggaaaaaaaggcccagtcatgtgagtgctcacaggaatctagctaggaccctgtctggtgcaggactataccatattgcatccaggggttctgaagccaatctcttaacccagtgttgagaaggctcgtttgtattctccaatgccccatttatatttgtgtttgtgcaatgcttcactgacttaagctatttaaaattttaatctaaaaattcatcctaataagaactcacatagccaggaaacaaatgacgctcagcgagtgccacctctgcgcatgcgcacacttccagcgcactggcctgaattcagtcatgcagcctttccgaagatgttcacatttgctttcgttagagcaccgtgaattctttggactgctgaatccaatccatttctttctaatgcacgatttcaaagttctagctaaaaattcaagtttcatgagggaagatcctttaagcctttcaaaaatattcgattactaaattaacgtgagtactgtcagcaaatacagactcaggaagactgactcaacgacagtaaaaatcatgtggaatgcttcctggatagtttggattttacctttcccatttcacagattaaagcactataatgcaatgattaaaagatctacctgagtcttacaatttcagattgtttagaacttgaaaagagcccaaaagttattgccctctaactctcggcagtccagccaaagtctagaagatgtaagagttagtattctaagtccatgctattattattgttacacagggctcaaatttaagtgtcacaacagatatatcaaattgccaatgtatgagaagatctcaacattgtattggttcatttcttcccacttttgatgagacaataataattttgataacaagtacattcttcaatacatggcttttaagggatggtttcctttcctagccctgttactacagaactgtattcagaggcacactgttcatagtcatacagacaagctagaaagccagcacaattggagaatgactgaatggagaactcctttgtcacatgaaatgtgaaagagagaatctatagtggtcacagaatgcgtcacttcagggccaagcaaccacagcaggaagataaagcaggcacagtataaaatcatcagccctggagaacagatgaactaatggtgacggctgagacacatgcataactgcactgtgtgccatggaaagtcaatgtgaatgaaataaatatatccatgtgtcacccatggagtctatgtggcaaagctatgactataatcacatataacttataaatatagacttctgtttatatctgtaacttgctatcaagtcacagactcttgtagtctgacttcactcaagctgaagagcaaggcttccttttgttaccatcagatgtctgcatcattttcataggtttgtgggtgcatagaagagtcaaggctccttgggttgtgctttcttatagaactgagcatacttgtaggtagcttctgaagctcctcctcacaggctcatttatgcttccacagatccaatgggcctttaccatatgtgaaagaatacccatcaataaggttcccacttacagggagcatttacaaacaaacaaacaaacaaacaaaaaactggttctataaattttctttccatgaccctagataaaaccaggtaatattggcaggataagtactcaaaatatcaataaagagacaaactagcaaaagaaaatatgattttggaagtcagaaagtggcttcatgaataaaaacagaagaagctcggtgggtacgaatggccacagtttaatgcgaaaaataaccaagcatgtggtggcttcaaaacgctcaggagatttagaactgcagaatcatgtgactctcatcatgagagaaaggcaaagaggggacacacacacacacacacacacacacacacacacactgaaaagactgtagactgaagatctgtagacctgtctgagcccacagagctgagccagaaagctcacttcatggcagcaaaggagagaaacccgacttcctagagaaactaaatcttagagaggacaaggataccaggagccttaaaacagctgtgcaaaaggagaatgatcaagtacaggacaagtgagatcatgagacacagcatcaccttattgggttcaactgccaagtgggctgcttcttcagtctctcaccaagagactgtgggatttgccacagagcgatagatctaggtgaaattctctgagtttctttcatcaaacacctacagggagactatgcttgttaagtctcatccatgtatattttttcagggacttttaaaataacttaatatagattatctaatgtcctccaaatatgtttaaatatttaagaataagggggataaattgaaacctgcaattgtagaaactatacagataacagaggaaatctaaaacacaaaaggataatgtttagtattctgaaagcaaaagaaaaattttacaaagttatacaataaaggaggaatctttcaaagactaagaacaataatcaggaatggataatcggattcttgatagattaaatatacatcagaagggctagattcatactggagatatttctcatataataataataataataataataataataataataataataataacaacaacaacaataacaaaacatacagaaataaagctgacaaagttttatagaacaacgatttttctattttccatgtatcagaactacaggctctttcacaattagagttcttgattaataatgtctgctgttccagctgattgattaatatcttggattccctctgaaaacagacactgactacaggtatccagtgactctgatgctgctggtgtgtgcagttgacaaacagaaccattgtactcatagttcagccagcaaggattagtgcttcctgaatgcaagcccggaggcagaaagggacaataacaatagaaaatatgagtttccagactgagacgaccatcccaccaaactctcaataaaaacataaaacacacatccaaaggatacaacaatgatgttttagaacgttgaggaaaaacatattaatgaaaaaatgcaaaggaagggaaaagctgacaacaaagaaaggatgggtgagaggtgaaaatggttactccagaaacaatcattgcatttggatgtggcaatggcaggagatggttgttttcccactgcatcttgaaagtttactttgatacttaatgtggatacagatttctttgatgctgatgaaatggctcagtgcaaagagcatctatctactgctctttcagaaggcccacttcccagcatcccatggtagctcacagtcctccatagctccagatccagagtacctgatgccctcttcttacttcctcaggcaccaggttcacatgtggtacagatatacttagtcaaaacactcacagacataaaatgatataaataaaatttaatatttttaagaggagaagaaataatggaaagtatttctgggaatgaacaggtcaaagaaaatagaataatttatagagggaaatagaagtagcaagattcatgtctgtataagtatataggtacactacaatagaagtctcttattagagaagtttcttttagtcatgttcaaatcttgaggaaaacgttatttcttaaaattatgtctgataatgccaactacatgtcacaaacaagtatcttagtgtcaattcctttggaccaacaatgtggaaagagcccacacagggtcagctctcatctaagaaatataccttatcatgctgctttctccaacaccatagtcaacacagcttggcagatgctggtccttcacttgcacctcaaattcctgttactcgtaagagagtcaggcagcggatggccatatttgctgagttgaagcctgagttcaagatgttggtctctctgtctggattccctcataactgacagcaaaggttcaaaagcatcatgtcacacttggattcttttgttgttgttaagcccttttcagcatacagaaggctgaagggaaaacagcagtttgattggtctgcggtttgggatggcaatggactgatatcagaatgtttctaatggcaatgtttctaatatcagcacctagatgctgatgttttaaaatggtcatttgtgtcatgatttattttttataacaaaaatacctctggttatggtttactaacgtaggaagagctgtactacgctttagaaaagctatttgttgacgaagcactaattataatatagttacctccgagagcccaaatgtaattatgttaagtttaattatatatcattaattatataaaatatttaaattgttatgttgaattgtgccgcactagatgctgtacattttgctggcttgtggagcagatgtgcttgaagagtttggatgtcatccagaagttggcgaattgtaactgtttaacggagcttgatttataccatctattgaataacaatagttgcttctttttagtggtagaacaatatcgagtgttgggattaagtggcttatggctagatggtgtttcgttaattacagtttagtttaatccaccaaacatagggggatcacagacttatttctcctgtacggcagatgtagtagaattgtttgtgtatcatgttcatccttgggaaagcaacttcctatccatgaaagtgatactaggaagaatgcctgagttttaaaagagatccaaaatgcaacagcatgtctttttgcatggaagatagaacacttcactaccaatttaacaaagttagtgtacttcattcatattaaatgccctgacacagccaagtttccatatatgtagactaagaaagaaaagaactaacaatacattttgtttctgtgatgtataaatacaaaactagaacttatagaatgtgatactgtgcatgcgctcagatatatgttctggattgataaacatgatgccgtaatttcatctctgaagtagctaactctcacatttacatcgatttgaaatagagcaaagaagagaaatagtaatttaaatagtaatgttatggaaaggaaaactatgactaatgtgtctgtcaatcaaatctgcaatacaattgacatttttatcttattttatgtacggttagcagtacttttaaccaattcagctcactgtattttgacaaaaatctcacaagttttggaaagctcataattaacttgtctaaaggaaataacttcagtattccctccctacaattctcaagagtgatacatcataatgtctgccacattcgaggtgattttattccacagaagttcaattttaggatgcccgatgtgtatacattttcaagatagcttgtagaaaaagatagctttttaccaagaaaagaagtctcaaatatcttgacactaatgttttaagttataactgtaaatgtttgtagctatgtatttagttgggaggtggtccattctaatacaaccttcagttgtaaataatgtctctagctgcaaatgtagcagaagatgacttagttggccatcattgggaagagaggccattggtcttgcaaagattatgtgccccagtacaggggaatgccagggtcagggagcaggagtgggtggattggggagcaaggtggggggaggatataggggactttcaggatagcatttaaaatgtaaatgaagaaaatatctaataaaaaataatgtcaatgacataattggaaggctgtgtcaaaatctgaaggaaagagtgaagaattttaactaacaaggaggctttgcaaaagggcagatttctgtttcagatgaagagggtatccagtgatgagagaaccttctagaagaattgtgtttaggaagttggaagagactaggttttgttcacaagtccagggcttctcagagcagaggcaattttggggactaggatatggcttcttttattcccatatgtttccttctatttttgaaatttataatataattacaatatttcttcattttccttccttgctccatttccaccttctttacatgaatggctctttcactgattgccatttcatgtacacctgtgtacccatttatataagctgttgagcctatagaatgttaattgtacgtatttttttagagttaaccatttgactgaatttcatcttagaagtgtatcctcaattctgtgttagttattaaaattcttgtaagcatgatcaatcttgagcctgttcctggcccagtcatagcaagaaacttttaagcttcctttgtctttacgaagaaataggggtgtcatggatttccccagacttctcctccttacccctgacagccttaggaagtaggaacaatttctccctgacagctttagaaacaccatccagtaatttatgcactacatctccttggataattgggatccagccacactgtgctgaacagccactggcttcggggcggcccaggcttaccaactgctacccttggaggaggaagagccagagggtgaacagattgtgtctgttcaaaacaagaaaaaaatgaggggtgggaaggaaatggggagacaaaggaggaacttttgataggtcatctctctgtcaccctggcgaagactgcaagaacaatgaaaaaccacttcaaagtgaacaatgccatgctgaggacatgccaacttactcaaagaagacttgtcactgctgaacacattcattaaggggtatcatttaaacaccccattttcccactatttttcatttctgaatgagtggaaaaaatgaatgaattgatcaaagactctgaggttgccagcctaccacaatgtcatgcagaatagataactgcattgattacatatttagtttttgagatagaggtttgcaaagaacaggaaataagcaaagtttttgatagcttcatgtaatttcatagatttgaaaacttccagataggaccccccccatgcttactgtaattttcaattgtactaaaaatgaagggctaaatatatgatttgaggcttctgagaataagcaaatgacattttagaaaataggctgtggcttggagactggaaataaggagcaaagggtgtctttacatctatttatgttacatttggggataactgattaaggggaaagagacgacagtaagtgtgtaatttcatgctgttagttcaaaacattatttctaatctgatgtgttagcctatactgtgaatttagacatcaaagtataaataatgtaatttaataaagatagaatgttctaagaatttccaggtgtatttagatgtgctaacaatacccaaggtcagtctttggcagagaaactgagtcctttcttagtgaacatctcaaagtgtgcaaggtttagttaaacaagtgtttcaagtgtctggttaattatctagaggttccactgagaagtgatgctcctacaagtgacaaagagcttgtctttctgctctcttgacttttattattattattattgttattattattattattattattattatttgatcataatgaaatgtatatgtccaggaaattatttgtgctcaactctcaacattttttttccattttatattaggtatttagctcatttacatttccaatgctataccaaaagtcccccatacccacccacccccactcccctacccacccacttcccctttttggccctggtgttcccctgtactggggcatataaagtttgcaagtccaatgggcctctctttccagtgatggccgactaggccatcttttgatacatatgcagctagagtcaagagctcggggtactggttagttcataatgttgttccacctatagggttgcagatccctttagctccttgggtactttctctagctcctccattgggaggcctgtgatccatccattagctgactgtgagcatccacttctgtgtttgctaggccccggcatagtctcacaagagacagctacatctgggtcctttcgataaaatcttgctagtgtatgcaatggtgtcagcgtttggatgctgattatggggggatccttggatatggcagtctctacatggtccatcctttcatctcagctccaaactttgtctctgtaactccttccatgggtgttttgttcccaattctaaggaggggcatagtgtccacacttcagtcttcattcttcttgagtttcatgtgtttagcaaattgtatcttatatcttgggtatcctaggtttggggctaatatccacttatcagtgagtacatattgtgtgagttcctttgtgaatgtgttacctcactcaggataatgcccctccaggtccatccatttggctaggaatttcataaattcattctttttaatagctgagtagtactccattgtgtagatgtaccacattttctgtgtctggtggaatcaccatgcctgacctaaagctttactacagagcaattgtgataaaaactgcatggtactggtatagagacagacaagcagaccaatggaatagaattgaagacccagaaatgaacccacacacctatggtcacttgattttcgacaagggagctaaaaccatccagtggaagaaagacagcattttcaacaattggtgctggcacaactggttgttatcgtgtagaagaatgcgaatcgatccatacttatctccttgtactaaggtcaaatctaagtggatcaaggaacttcacataaaaccagagacactgaaacttatagaggagaaagtggggaaaagccttgaagatatgggcacaggggaaaaattcctgaacagaacagcaatggcttgtactgtaagatcgagaattgacaaatgggacctaatgaaactccaaagtttctgcaaggcaaaactctcaactttttaagtagttaaaaacactggtggtcaaagtccatggtcttttgtttgttggcttgtttgtttgtttgttaacctccaaagttggcaatgaatgaaacacataatatttacttctctattgctgtatttggaaatacatgttgagctttcacaacaaaatatgcttctgtttgtttgtgtgtttgtttgagatgggatcttgctagcctagaatttgtttgtaggctaggctgagcctgagaccatgacctttttacctcctcttcccagaagatatgctcttgttgcttatttatctttaaaatgaaaccgccaccaccagggactttttctggtgggcaaggaccacagaaaataagcagcaactaaatctagaaaatgatgtaggtataatgaaatatttagaataaatattctaaagcagttggggctagcaggcatgctctttgcatcctgatagtctgggaagttgtggaaataagcacacatttcctttatgaagaaaactaaattcattgaagaggctccttactcaatttctgaggatgaatgttttcttaagtgaaaaagagacatagagactatgaggaatctgtgcctggtattgcttttggaggaatctgtacctagtgtagtcttcagttatcaggaaaaagaaaaagaaaaaagaaagaaagaaatagaaccttattctgcagcaaaataccaaggtgagagagataatagaggctcatcctgagagtttgcttaggctcccggagtgaccttcgctttgttgctgacagtgtatacaatgcaccttatccactgttgtcttttgaattttagaaagggttctggggctgaattgcactgaaatatacttttacttgaaaggtctgactgagtgcttcactcttaagtggctgccattaaagtgttctattcaaagtcaaacccttccagcgtgagagaggaaggaagacataaagaagactggcagaactggggggccaatatgacccttagaatgaaagctgactaaaatgattaagtgtgcaaaataaaaccaaaatgtctaaaaggaattctgtggcttctgttactctcaagatacgtacgtccaaattgaaatacaatcgctgctggacagcaattagctatccaatattgggtgcctttgtgatgcagatttcttatatagtgatacaataccagacttatcattaggaactgggaaacctagtgaaggtgctgaccatcattctccccctgaatggcacactgaagcacagccattagagtcactgttgagctctgtccccagcggtgagaagcatttgtgtgtcctcccaaggtttccccagcagggtctttgaaatcatgcttcattctctcccatgcacagaaacagagattacatctcacaacagagctcatatttagcattagcttagtgacccctgctgggaatgctgggaaatcttaagatcatcttctacagattcaaagttggggttgcagcaaaatagaggacaactgatcttgcattccagtcagcattgccatgattagaagctgacttttccaccctgagagaaaagaagccagagtgggaaaatggtgaaagtggtagatttggaattggcacgtgccccatggttactggcttattctccatggttcctcgtctctctgtgttttgccaaatggcacttcttgatcactttccaatgtgccttttataaaaatagaaatgaaataaagagaaatacaaaggcccagattatgtcatctgcctcagaatgtttcctcatcatcacaatggccttatgtagtatcatatggcaacgatttgaccatggtgcttgcagtggtaaactgttgagagggagtaaacaccccacagagcagaggccttgaactattatttctatgcatatttaaagagccagatgtacttttgtcaatgggtgaccttttgttcatggacacacattcaagattgtgtgttccgagatcttcatcgcagaccactctgttataaggaatatcatgttttagtttagataaaataatataagtgcctaatgaccagtaataatctttacctgcaaaataggcaaacagcaatacttcagcagggtaatagaatttctgttttgttaggctaaacattttcaataatttcaattttatattcatattaatattcatattaagagtatgagtgtgtttacacatttacagctcagttgttccacatgaactcagcattaaatgttgacagggaatcctgaactaagtagatgtcatttggcaaggttcttcctatgaatttctacttatatggcaagtaaagggataaaaccacatgatcaccttgttttcctttctatctttgcttcttcttttctttctttcctccctccttccctccttttgtattttcttcacttgcttcttcttttattagcatttatttttccaagatgtgaaatagatattaaattcattagctctcccattgactagctccagtatattctctgcttagatgactactgtgattcctttgcaaacatgattattagcttggagtccataatgtatttaaaaccagttctctatccattagaaagagaaattgacaactatcatgtggaggaaaacactcccattttaaaagtaaaaaccagactctttttggacttgaccttttaaaaaattaatgacctctttatattaaattatattaaatatatatttgcataccttttctactactaatcataatatctcaagccattagactttttcatgactttggtggatttaagggagtattagtcaggaattttgtaagatgtaccacaatttagtctatatgaagtttattctgtttattgaccacacttaggttgttttgtgtgtgtgtgagtctgtgtttgtgtgtgtgtgtgtgtgtgtgtgtgtgtgtgtgtgtgtgtgtttcttttgtccttcttcaatactagagataaagtatgctttttgtaccctcataatgggagggaaaacatcatgtctatccttatctctggtgatggtagccttcatcttcattgctagtttttctttccatgctccacttttaggagagattataatgacactcactttctaaggtaggatgagacaagcagacaggatggcttgggtagaaagtagtagaaagaaatcctgtccagaaatcaattttattgtctatctcctttcactgaagagtcaaggcctcaaagaaagagcatggttttcccgagggaagacagagtgagtagaaaactatttgaggatcattaatcttcatcccataggttgtgatgcctccaataatgcttggaaatattgagttctagactccaccctgaggactagctaaagtgctctggcaatggctatacaactgaatagggcataagtcacctgggacttgtccgattcagagagccaactgaacacttttcacggggttatcacagcctcatccatcctacagaacataaccaactcatatttgctggctggatattgctgaaaatgcaccacaacaccaagtccaaaggcagtgagagggtcctgtattaatcaggtttctcctgtgctacttaccatgatagcagattttattatacagtaactgtggtggtagaggtcaaggtattctaaaccttggtgctcactagagctggtggtgcagattactatattaataggaagctccaggatgagatctccagagagcaggtagatattgatgtttcagttcaagcaaccaggtagaaaaggaatgaatcttcctctttcattggcttctgtttcgaaactcaggtttggttgacgctcactcaggctgaagagggtgatctgctttgtttagatgatgaattcaaatgctaattaggtctagggacacacaaatatatcaaaatagtgtttaaccagatatctcggcatcccctttgcctagttatatttctagaatacaatcatgggaaacatattaagggacaaatatcataaagtgtgattccctaggaaccatgtgtgtttgtgagcttgtgtgtgtgtgtatgtgtgcatgtgtgtacatatatacaaatacacatacacacatgccatatatatatatacatatatatatgctgtatatatatggcatgtaatgaaattttgagtagaaatgaaagaaattctgtttcaataccctctgctgtagcatttacaggtcaggaaaaatatatcttctctcgactttagaatgatttttcttaacaaggattagcagggaaagaagttttttttttttcttttaaataattagcatgttcagtgaagcattattctccagaccacttttccattttcatgtattaaagaaagaaaataggaccagggcagcatccgtcaatcgggtcatttgactaggaagatgggtaacggccagcaaacacattgctccttcttggccttggtttaattgcctgtaaaatgaggttggtcaatgatctttaaatatcatttagcagtagaaaagactgtgttacactccctattattagtttacattgttttcttcatcatctcttggttgtactaactgtatagtgaaactagatgggacactgtggctaatatcagaggcatggtagttaaaaacagagattcaaatcttagtgatgctcaaagtttaaatttcaccagactgattatgtatgagttctaataaaagcaggtgattttcagaacttagaaaaaaaaaaaactatacttaattggacaaagacttcagtatattacatatgaatgcttatgaaatagtggtcaaatatagttgaacagcaagtgacttttataaccagtatgtggcctggatccaagaaacttaaaaatttccctgtctcccaagagatgaaatttgttgaaatgtctcatccattttgtaaactgaggccaatccttgctacgagcagtcatgacttgctatgagaagtcatctgagagaggacagttagtactcagtcctaaaatcaacatgagaactgatgccacctgaggactgtttgtttcttctttccttgggttgatttctttgagaagctgacaaagggttttcacccagcttagaagttagagccaggcatcttttactcacaccatgatcttagttcagagattctttcagccttgaattaatgccatgagaaggttatcaattttacgtttttaactagattgtaaatgccctgaagttagaagcaacagttttgatatctttggtttttttttccccaagtacttactacagaaactagaataaaacgcgtatttaatagttttataatgtagctcaaagagctctgacaaaagcagaattgagaactctgataaatgcagccaaatctcacaatatgcatggcaaaatgcatttaacttataagttaaaagatagtatttttgttattccagggcagggacttgaaaatgatgcctttaaatgaattctttagtcatagtaattgaccaatttctcacctaggcagtatcactaaagataattctctaatactaaatttatttagccccataattatgggaaagcacgtgtacacacctttcaaaaggaagatgtgaagagtcaactaactgctccgaggcccatctatgattcgttcctaaggcttatataattgaaggattctcactgaccatgcagcaataaaactctcagtggcagatgggattgatgtcaggttacatcgtcatggttgaatcctggagtgtcgattactgttattgttgtctgttgttattttgatgatgctggtaaatccattcacatctggccacagctttaataaatgagtgtgatctctccagttacaagtggggcttggaaggagagtgggaggagtatgtgcctaagaaccaggtttgaatcccaacacccatctaaaaactttggtttttagcatagtcacactcatgcctaaaagccaaacactgatggggtgtgtagacaggaggattgtgggtgcttaatatctgccaaactagccctagattcattgagctaccttcctctagggaataagatagacagacgatggcacagcaagatacaaaacatcccctggagcctacatgcatggggacttttgtacacattcacatgcacacatccacatatatacatacaaacacactgtcacactttccaatttcattgcaaaaacacacacaatatacatatacactcacaggaagtaagagttatttttctttggaaatcaaattcattggcagcttcatataaaacttagggatagagtgaatctctgtctgtctgtctctttctctgtatctctctgtctctgtcttactgtctctctctgtctgtctgtctgtctgtctctctctctcatttgctttctgacaaaaatgggatagaaaaaaggctctgctgaagaaactgccactgagtttcttttcattttccaagagaaaagattccctttaaacacagaaggggatagagagatggacttctttttgagcaagtatattaataccctttcaacttgtagcctgatcagatacgattattttacttgccagaataccccaggttttctgggggaggcgggattctaatgctttttaaattcaagattagggctcagtacacaccaagcaagcaaatggaacctatttgtgctgtgaattgccttttactgtaattgtgcataaactactcagacaggaaataaaagactagtggtgaccgagacaccatgccaaaacttggatgagctctgtgttcttgattccgctgatcagcatctacacctttgactaacaactgaaattctatccccgacctgctgctgtaagctttgaggatctctaagataacatggcaagagaatgaacaaaagctagaaaacaaataactgtgttgccaccttcgatagtggagttctctgggtatgatgtataaccattctgcaacttggaaaacagcctcccgatcttccaagaagtgttgtggctgctggaaactggaggtttgtccctgctattgttcataagaactcatttgttttgtcatcacttttaataagggtataaggttttgttgtgttgtttgtgcttctggttgggatttcaaatattagaagacatcgaaagggaaactctgacttctgagataattcgttggtcagcaatttcaaacttctttgtgttctgtgtataagatgctttcattgtaaacaacccaccttgtttaaaaatgttctaaagcgcagtgtggcaaggacgttatgagaaaataattatcatccctgtgtgtttacaaagagcatgcatgaatctgtgcacatattcagaaacatagtttgttaagaattccgcgccacaaaagatttaattaaccttttcagtaggcatccagccccatttactgcctctcctgtttctgcagctaccccatggctcttacacttgattctgcccctcctcttttatctccccatccccctctgcacacattttcatcaatgatcctattgttaaatttgccagctggcattagaaagtcttacaccctccattttctatagcaactaatatattccaatgtcagatttcacttttatatgtattcttacaccctctgtatattctaaaaagccattttgttcttgaagcatagcatccttagaaatattaggtagtatatcaggaatcaggctttggattatatcttttttctctacacggtataacaggaccttttatatcaatatgatatggaggttaaaaagaaaaaaaactacaaaaaattttattgattattgataaggaatttattacttcaatcattacaactttattattatatactgtaaagggcttttgatattaaaaaagaaaaaaatactaaggacacaggaagtttgcacctcaagtagcactagggtgaagctgtaatgagataaaagttaagttttatatgttttaataaagtgttcattcttgagcaaactttaagaggctttttgttcattgtttataacatgcagctgtttctccaactgatttttttctaacctattgtgaagagagtgagtatgtacattcatacccccacccctatttatgtaatgcctggacacttggttgctaggcaacagaaagtatttgaatccatagtgtgttctctgattagggcaaaaagcagaagcctgcacagatgagtcctctgaagttctttgcatttttgctgaaccaaacagaattagtattgcatgacatagtaccacttagctttatacagcttcctggcagtttccgcttaatcatggctataaagaatccatacttgcttggttattactacaaaagagtatgctgactgtacttccctgaatggaacctttgatgcacaagatctattccctttgaatctttctaagttactaaagttcatcttgtcggtgaaaggagactgaggtgttcatttctaatctctccctacaatataaagtcatgtaatcaaacaccatcaataaaactcccacaagaaatactgaagcaaaaggaatttgctctatacgttgtcagttttaactaagataaatggattatgtgaaactgtcaggcatttggaggcagaatagagaggtaaaattttactcatgagatatttccttgatgcccactgattcttgagatggagcaatgatgttatggcaaaagagaggtcacttggtcttttgttggaagaagtataaatagatatgtacaatacttctaagcaaaatgtaatcagtgagtttctgggatacagacaaagtagcaagcaagttgtctagcaggagctgagcatcacaggatcaaattttgcagacaccaaaggctactcacctctgctgcctttctaagctaattcctgctcatccattaacacaaaagattgttctggatgatatcttcatgggttgatttataaagtgaatgtttttttttgttatatgtcttttcagctcctcttccttcaaaaaaacttgtatccatttctaactatacattgagcagtatcatttagcgtccaaatcaacatggacctttctccatcattactctcatggctccattaaggaaagtgtagatgggtccctccatgtgtacttcttggtttgtggtttataccctgggagctctggctgattgatattgttgttctttctatggggttgcaaacccctttagccctttcagtcctttctgtagctcctccattggggacccagtgctcagcccaatggttggctgtgagcatctgctcctacatttgtcaggctctggctgagtctctcaggagacagctatatcaggctcctctcagcatgcagttctaagcatccacaatagtgtctgggtttggggatgggagggatccccaggtgggacagtctctggaaggcctttctttcagtctctgctccacactttgtctccttatttcctcctgtgagtaatttgctccaattctaagaaggactaaagcacccacactttgttcttccttctccttgagcttgatgtggtctgtgaattgtatcttttagccacatatgtagcagaagatggccttgtttggtatcaatgagagatgcccttggtctggtgaaggcttgatgccccagtgtaggagaacaccagggcaggaaggtgggaatgagtagtttggtgagtgagcatcctcatagaagcaggggtagaagggataggatagggagttttgggagtgacctggaaaagggataacatttgaaatgtaaataatgaaaatatccaataaaaaagaaagtgtagatggagatgctgtttctattgatccccagaacacataaggaatcacacaaaatttaaacctagtgaatattggctatctgtgtattggctttgaaaagcttcttaggcagggaactgtcttccctcgttacagactatgagaaactgggtttagaatctctacttttgatgttaaaagatgttaaaattatttctttagtatagtgtgcatgagtgtgatggtgtgtgtgtgtgtgtgtgtgtatacagtttcacccaacacataaacatatattatgttgcttagcctttgcccaacacttataggacagggaatatgttaagtttgaatctttaggtacttgaaataaaaaaaatgtgtaggtttattttttcaagggcccaactatactgcctgggactattaatacaatattgataacacaaataccttactacatgaccgcttgtatgttcttcctctgttctgttccttaagttttaacatgatcactgaatgacagaatgggatgtccactctggctttattttcttcccctcttggcatcactatttactgcctatatccttaaaatcaatcaatatagatcaattattcccagagatcaaatatgtcagttaaacttgcatgccatctgggacatggcatgacagttgcaaattttaaaaaattaataatattcatttaattgatactactgaatttcattattctcaatgaggatatcattaagcaaatgtttcaaaggaaatagagaaattgttttgattgattgattaggtagtaggagagaaatcaggcactctcttgcctcattgatgcaaggtgtctctctgattgattctttttgtcaacatgtattaagtattgaagagttgctcccaactttaacttggatggggtagccaagattggcccaggtaacttactagaagggaatgcttgtggattgaattagaaacgagacatctttccagcctttttgttcagcaatgtgattttagagaaaggcaagtcaggatgtccttcagaataagaaggagggttaagtgccacttttgtgcaatttcaaacatgaaaatgtattgtgtctcccagattctaaatagcgttttttttttctccataagaaaatgtttccattgttataaaagatttcaagatgaagtctatctcacttaaattcaagaggttaaataatggtttcaatatggttcattctggcagctttgagaactcagagacgtaatttgcactacaaatgtttagcatagtgaaagccatgctgaactcacctttgcaaaactgcacaagtaggaaggacaatttgttagctgtgctctatgcctggcagagtacagatcacctcactctactgactttgctcctacaagcacttccagatgtaaaccagtccatttaaagctcaaatgattttaacccaatcaaagggcacaatgcgttggaccaacgtggtggctctcatctttcatccagacatatctttgttcatttgagaatgaagtagtccacacagggagttagaggccaccaactgctatatagcaagaacatatctcatgcaaaagaaaagcaaagaaattgtgtatttagatcaaaacaaacagacgcaccatctcacagtgaccttcacccacagagcgatcactagtgatacaaaatgagcaaaacagcagtgataagcaaaacttcctacagtgaaacctgcgaatcaacagagtaagcaacatcagttagaactgaattagaggcaggtgaatctcaggcataagagcaattagatgggaggaaactgggcatcctttttgggggtctcctgtcactgtatcacagcatgccttagaacctctgggatcaaagatgcacctgaccatgctcagctctgtgccgtttctggagattccaagggtggtgctcatacttacaattgtgatggtttcttccctgagccattcaaacatctccctaagacttgaagggttttaagccaagggttatggagagagagtgacaatctgtagatcattgttttgcttacccttttctatcccggtaccagagtacccaataaaacatctttgaaaaaaaatgaagaatttatttctccttatagtttctgaaagttcagttcataatttgttgatggaagttaattctggatccatgtgtgccaagacagaatgtcatgccatgaatcatgtgattgagaaaattaactcattttatggtggatgaatagaggagaaatggggatacaaagggctggagacaagatttacctttccaaagcaagacccaattgactcttgtcattctcttaggcctcacttccttatagggcatttatctatagaagcagcaatggattatctcatttttaggttaatgtttagagaagtccactagcccctcagtagcaccagtagcaggaatctaagtcttttgtataagagcctttctggtgacactttctgtcaccatcattgcactttggtagagcatacatgggaggataattgtacagggaagaagtgagcataaaaggtactgtaggagaacacaggagaagccagacatcagtgaaatgctgattcataggccagaggaaatgctgattagatccaaatgattatttaaaataaaaaaaataattttatggcatttgttgattttataatctttaagactttgcctagctccataaccctggctagcctggtacttactacatagcttggttatcctccttcctcagctttcaaagtgcctgtgctaacagtcatataagtgtgttgctgtgtctacacaattttaagttattgttttgctttaagccacttttctgctttgaccatttctacaaacaagtaatgattccacagtccctatttcttgaggccttgaaaagaagacgtatcaaaacctcatgaaatgtgtaaaatggtacagcaaacagtgttgctatataggtaacactccaaatcatgttttactcacagcagaaactctgcagagactcagtctactagttgcttgagtatatacaaaacatgaggaaaaatacaatataaatgctaatttcataatctagatgtgttctatcatctaaatatagttacatatttgatattaattcatatgctggttgaattcaactgataaatatccatttcagaaacatctttgctaatatttgccaatacccaatctaatttagtcacggaaggtcttagaaagaaatctctccatcggcctccaaagctctcttttgaagatctttaaaatcacatggtagttcaggtagaaaaaagtttgtctctaagggttgaggacattctagtgccaatcgtcatagaatccatggctgcaaactttaccttttcctcagtcaggtaacaaatagcctctttcatctcatcagtatgctagccccctattctccattttacttcccatggtttccattacctccagatcagtcatgatctgaagctagtaaaggaaaatttctaccagtaaacacatgaattacaaggtgtatgctaaaagacgttatggaaacttgttccaacctatcccacccctctctgccctggacaggtaccctttcattatttaatatatccttgctctatctgccactggtcagttaatcaacaactgtcttgattggaaaattggctattgttctatctgtgacatagttccgagtcacaatgcctacatcatccatctacctggagtacaccacacacaggcattgcatcatctcatagcatctctagaagagcaggtattgctcaatgagagacattttaaaaaatcttcagtcatataaatttgattatagtatgcatatgtagcattctataattatttttattatattattaattatcactgttactctgttactttggctgatttataaattaaaatttatcttaggtatataatatactaaagccacagtgtacctacgattcattgcaactgtgtctgaaataggatgcacacaaccctcatttgtagtatattgttttgcttctaaaagggtttctaccttgacttgttgattttaatgatgcttaaacaaacacaaaacacttcacatctttgctttgtcaatgggtgttcatctgactccctctgttcatttattaaaataaacattttattagctttgtggccaagttctattatggattctgtgtctatctgatctttgctaatcattgcatgaccaaatgcaataaagcacatgaattgaagcagtgaataagatttgtagctagtaagttctggggaatcacaaccagtaattttgaaatgtgactgaattcttcccacaattaaaatctttcattatgctacttcaaagctaatttctttcttgtttctctgaatagttgcctccattaatctcactctaggtaatgatggtaatgatacaattatatgtaatcattgcctgaattcaatatgtaacacatcagctcctttgtgtggtgattgtacagttctctgcaatcctggaatttggaaaatttccatcatgtcatgccaagatcagattcaaaagtctgtgacattttgcataacatcagtcaatcaggtttcccaactgtcccttacagtgattgaacaaactcatccatatggctggtgccaactgaagctgggaataaaagccagaggtaggcaaagcagggcttgctgtttacaaggtttccaaagcacttaaaacattcaaaaattgatgagaacttttaatagacctactatatcagtgattaatctgactaagctatcaatggcacaatcccatgagtttaatttacattatgttaatcctggagagtttttggctatttccttagcatttgtagctactgttagttaacagttgttatttcatattaacctgttcttcaaagtactaataaatagatgtatgtttctccttttaaagctatttagatatgaaattttgctcatattataaagacatattttgtgtcaaatatttatgtaataatttatcaaagtgaattaatgtgctatatgcatgtctttctaaatagaacccaacatgtctgttaacctcgtttctaagtttccaactgccctgtgaagaaaattgtttttgaattgtttccacacatcctaccttttataaaaaatatgaaggttttagtcatttgacaaaggtttgcaagtcacaattcaacccttatccataaacttgttttttgattattcttccttaaattatggcactgccatagaatacaatgcatgagatgattctcccattgatcctgcaaatctagaatgagaactcaaacatcctttgtagctgctataagtagatcttccatgtaattctaaaacaaatctttcaactcattccttcttgatccctattaatactttgtgtttttaagggatgtaaaaataaactatccaagaacatagattatatttgtcagtgactccaatttaaacaaatgtaacccaaacaatgagaacatttactgttggccctataccttattttcccaacttaacactggggactcctaggtgctgagtgtcagggaacatcctacatcttcccatttatcacctctgtcaccatttatacagctgacatctctcccaggccaaccataattctattgccatggatctcatcttcctcttataatcctttaaagcatttttttcattttatatttttatgtttatgcaaaagctcattctgtgcactaaattacccgtacacgtgacagtcagaaaaccactctcagacatccatcctctccttctatcaaacaggtttctggaagactaactcgggtagtgggaagttggaaaaataacattatcccacttaggcccctctgtatcacaaaatgacaatttacactgaagcattggttttgctggaagcttaaaattaaatctgaatatcttacattgcctttcaaaaatccaatgcaatcttttccattttcatcatcaaacagaaatttcctggtctcctgactttgctcctcaattacaccctctttctttgagagggccctttggacattccaaagttaccctgatgatagaaccttgtactctatgtttcctttgactagaacatatgtctgtccttgttgttctgacaggggtccttccagctcattagttaccttttgtcatgcttcctttccttgtttttgtccacttgggttgatgtaacagaatatcagaactgggtatctcatgaactgattttatccacagttctacaggaaatgatatttcattttcagcaccattacaaaatttcaaagccaagatgttttaaaataatagaaatccatttgctacagttttataagctgtaaggttcaaaaaccagaattcaggttgtggtgagttgctagtgcacagaaggcattcatctcttgtgtttgttatctataagggggatatatacagcatatatatatatacactgtttatatgcatgtacatgtatatatgcatgaacataatacatagagtgagcatatttaacttatatatagtgttacatattaaacatacagtaacaagttcaagtacactatctaggagtttcaattactgttgtgtaagaacacccagaactactaaaataatatgttttactttattctcctacctctctttcttcaacacccattgtttgttttttaatgtttctggagagtgaaccaagagccctgcacaagctagacaactgttttatcactgggctctattcctagccttaaataatttaaggattgttttccagctgcacaaggtagatgtgagatacaggtagcacacatgcagggtaggtccctgtatttactgttggaaaccctttcttaccatgagttgagctcagtgatgtacacctgcagccttagacagacaaaggtggctcaggatgctgatggtatggatggagagcagcccatgcctctttgccagggccaggtagaagagaatgcatcagtgtcaatcatgtggagaattctagtttcatgcaaaggcctaagtgccagactactatgatacatacctgagacctcactagctaattgttgatgtgattgtctgagcacctccagtgttacttactaaactactccaatgaggaatatttctcctgagacctcctggacgcatcctctagaatgtggtttgcattgcttccttacttcctgattggcaggcttttgtcttgttagccttcttcttcttctttttttttttttttttttttaggtcttttgaatgtatttctttttttaatttaaatattttttattacgtattttcctcaattacatttccaatgctatcccaaaagtccttcataccatctccccacccccattctaatcctactggtatcacaccatgtcaatttgggctgatatagcatagaaactttttcttttactccttatctgttttatactggctgcctctgttttaggaggcttctacatcatgacttctgtaaatcaaaaaccagcttcagatggtgtctctacctatggggaactacctgattcctttcaaattatgtttttctttaaattttccgttttgcataaggaaacacaattagagttagcaatatttgaatagcccaagtgggattttctaaatgagttaatattacctcaaatttattgacctacccttctacaaaattgcctaaatacagaagcatatacataagaaagtaaaagtttatcttaattaagactgttatatcagaccattataagcacaaataagcatttctattttctgtgtaatgaaatagtatcttgagtagaagcaaaccatcaagcctggtcccagagtcactttgcatgacacctttggaatatcacaagtctatgtttagtcaatttagtagacttggagtaacccaataggctgaagtcttaccattaaacacactcactgaaaacactctcacacatttattttcagccttacactcattcttcacattttctccttctggaaatgatagtctgtgctaacctttggactctggctctgtaattctggtctcaccctcatgaagtcatatctcatctttggaatttcatccacattccttcctctatgatggttcttatcttcattgactgccatcttctttcattattttaatcacagttactagtagctgactgtttctatagcctacagttgagacccacatcttctggttacagtgcataaatatttaatctttcaatgaacctgttttaaaaataaccaaatgtttattgttaagaaattccatttattataagctgaccaagcagtatagaaatctcctcacttcctctctttaagtgttagtttaatatcctttaggcatatgagaatttttacaaaaatgtaggtattacaaaaacagcatcttattatgatattatttttaaatactaaagaagagcaggaagcagaacagaacaaagaagcaaatccaaattatgaaactaacagccaaatattgctactaaagaagttttatggagtcaatagagatctctagaattgaaatagcatccgattctttagagcgttcgtgtagatggatctgaacacagaagcccaatcacacatattattgtccgagtggggattattcattaaatactgtggatcgttgtactcaaagagtaaacaaaagtaagcaagaacactgttttagtttcattagtcttcttcacttgtctccaaccattactgatctcagtctctctctgctttggaagtatctttgaacttccaatgttatcttgtgattctctactgaaatctaactgtcacatggtcacactgcctaccatttccttaaaagtacactgttaggtaaatccagctaggagcctgcttttatgtttacttttttcaatcaagaaatggtgagatgtatcaacttaatagaataaaaggagagtcaattgtgtttctgctttccgcatgtgtgcacaagtgttaaaagattaactaaattttaaccctaagttcaatatagttttaatatatttagagaaacatttactgtaaagcataatagtgtgtaggcatcaataatgtgagatagagaaacaaaaatatccattgcaattttccaatgccttttctatgtgtagccgttatcttgatattatagaagaaaaaaatggaatcctagagttagttatttagtcgtttatatatgattctaaaaccaaactcttaggaagagcttaaggatttttagatgttcaataaaaatagtactatatattaatagtagtaattcagcatggttatcgaaaagggaagattatttaatattctaatgctaagttttgatactaagcaacagtagcttatcaacctccccccaatgaattctaagtacagaaaagattaagagctctgtgcatttattttgattaaaataatttatgtaaattttaattcaaattaagttcagatttaggcacttagaatattaatgcaaaagctagtccttttagtttagcttcaaatgcagggggtttttggccaaggacattgaagtaaacattttatctttattagccatcaattggcaagcatttattgagtggcttctaaacattggggaggagcctggacctcaaagaaattgccatctgttggggcaatatgactaaatcaaatgaggcaatttgagcaatgaaagcaagagagttcataattaggtgctaatttgttacagagtttcaaggaagcagaaggtgatagaaagtactatgctggtagaaaaaactttatggaagacatttttttcatgagccgccttgaatggacctaggaaagctttggaaaagttgagtgggaagaactccacttaagcgcactccagtggcacagtgaaataatacttgaggtttgattcaactgatataattcgagaaaatacgtcctgtatttgtcttcctattttgactgtaaactcagtaaagatgtggaccttcatcatgtctcaagacagtgcctaccgtgatgcaaagacagaataagcaatggctcttcaatgtcagatcatggctgatacagtaggaattggtaatacatatgggctgggaacagagaagcaaatgggtatcggatttctgttagtaaatactttattgataccactctgctccaaagagtctattagatgtgagtagaatttatttgaccacttaagtatacttaataatggcagtgaagttagagtggcctgggatgggacacttcatttcttttcagatatttctactcaagctcttagagtagatcttccccacatagaatcaatgacactgactggtttgcacttgcccacctaagtgtgtactaataaaactggagtaaagcctttgtttacttaaagatgttaaaaggatagagtggagagatgaatctgaaataccaattgagcatatcagtgagatcctgggataggtagcctctaaagtgacccaaagtgatcgcgagtgagtatctacacctttgaatctatccatgtgggctgtactggacttttaaaacttattctagtgaatagcaaaagcaagcaatggtggtatgtgaactggggatggagtcacaataatctaattgtaacccagccctctcctgagctttttcctgctcctttctcttctgttttcttttcactacctcttcttatcttcttctctttcttcctctatgaaattacctctatcctttctttcctgtccctctctgactttacatcttcttctcttcttctccagcatccctcagtctcgaaaagattgaggatgcttttggctaaaactgggactatctgcaacagccatgtgaaaaagatggcaacagatcttcaagtccagacagactttcaaatgactatacactgaactgacagcttggctgacctcatgagaacccatgaaccagaatcaggctacattgtgctagttgctttgcccctacaaattgtgtgaggcaacagatgtgtggtactttaagacatagcaacatcccttagaaacaggaaggtaatgcctgctgagccccatgcagttggatatattagccttgatttctgttggtatggaattcataggtgactgatgaaaagaatacaagactttatattcttggcataagaagtacaagaaagaccaaggagcagggagcttcctggcagagatgacattggtgctggcttctgaaagatgaatacacattttcttttctttatacatagaagttggggctactcaaactcttctgcttaataatattgtaaaattccagaatggaaaggtttaaagaaccaacttaataacaattatgaacacacagataaagtgcacttgctctattgtttgtatatatcatattattgtttaatttggccccaacgagagccaagtgctctaccggtagaatttccttcattatgccaattttgtcagcaaagaatctaaggctctgaaatttcattggcacatccggggtcacatcattcaggcagtcagtgatcaacacaaggtttctgctctgtgaaaacaagtacaaagtctcaaataataaatataacagaataacttcaattaatgtaaaagaaagttctagaggaggtcagaaagacgtaaaataggttctaaagtgtttttattttcttgaaaaacaaaataatctatggtaaatggttcattagacagaaagcctggtgtctcccaatagatttcactggaaagcaaatttactgatttccaaggtcaggactcagcgtagtatgctctccaacctggtttatccagcacagacagtgggtttcttttcttgtaaaatactggtatgagcagcgaacataattcattcgtagtaagacacgttattgccatgtgcactagattatgcctttggcatgactaatataactcattccctttaaggacacattcacgcgattttgtgatctttttacaaagctactgctgtcctataacctcccacgtgagaacagtaactagaggagtttactccttgccttggaggtgggtctggaggcagacactccttttagggtgctgaggtctctttcacacattagtctctcagacagaaatcacatatcccgcactgtgaattggcttctactgtcctttgtaatctttttcctaggacaatgggcaagagtcctctctgtttcttttacattctaataaatctatatgaagtttagctatccttggcttgtcgctgcatagtgctcatctctggctcaatctctgagtgtcttgactatgtttctcaaataacttgttttctttatctcaagatactaacaatgaggatatgaacattataatttaggaaataaattatagcttgctgtatcttatttctttatagttctgtcccaaccaggataaactatgtccactcaacagctcctttgacctgttaactctttcaaaagtatctctgctcacaactggactgacctctcccattaattattttataaaaaagtaaaagaaaagtcagaacagtttctctcttgagtaatttagatttattgtgtattgatattcctttaggtcaggtgtttctctctttctaaattgagactttgcgaatcccatgttccaggtaagggctcctagaggtacagctaagcttcagaagccatgatgatactgaaagagctttgaatgaggctctcagcagtttcttgagtactaaagccaaggccagtaataacgttctctgagagggtcatgctgtcagtctgatgtcaaatgtgaaccaatccacctttcactctttctagatgagcagtgtaagtttctataaataaaagtttaatggaaagcttgcttccctttctaactgcacagtaacttctatattaaatactgcattctgcattaatttgtacactatctttgagtctcatgttcattcaacaatacttgtaaatgtttaactatggtctgtacagtttcaagagaggtagttacatatgagcaagaataaaatgatagatttgtaaggctcgagggcggaaacaataaccatagtcaaataaaatcttcagctcctagaaataaagtcctcccaacacttacaaagagtttaattcatctataaatcacaaaatgatgcccgtgctgtgagctatgatctcaggagaatgtcttgccctctcctgtctaccggacactattttaaaggaacaatggtttgtaggagaggtagctgattttaaggctggaacaggtaagataaaagatcatccaagaacatcaagtagctagagaagcaagcgattgctcagaaaagaaattaaagatggcagagacaccagagacaacatgaaaggacactcagctctcacagctagaacctaacataggcaaaaattagagtgttgctaaaccttagatcccaacaaaaaatatatatgaatctctcaatcctgattcaatctaatattagttaaatgtgttcagttccttcatagaagcattacaagttaagtgtagagtgggcatagaaactacacacccaacaatagacagttcaaagaggaagatgagggagttcacagtgagagcccctggaaagtcattaacagagctaattgaatgaagttatcattactacttaatcatgttaaaaccatgtatcctccatactgtaccatgacatctctcctctatcattttcaccccagcttgtgtccctggagtttaatcatgacaaaatcttttgttttataaaatatctagctagaattcttcttttcttgaccctgaagaagaagggaattagtgtgtgtggagggagagataaagatgtcacactgcaacctgaagtttgcttaatagaaattaaaaaaaaaaaaggtttaaaaaaattgagaccagataattcataattcagtcccttcaacctacagaattccttgatgttctatgagtgtggttgaataacattttgtcttaaaatggaatactacacttgtagactcgttgcttttctttctctttaattttttctattttaaaaaatgggcttccctaacccaaacggttgtttgctttatatttagacatggattacattatactctcttactaacaaaaggccactccccagccaccagagagagggcaaaactgaggaaaggactgtgctcagctatggatccggtgaaccccattcatatgcttattggtctgtggacttggacaggtcagcttttacaccggaacttactttttaaactggagaattaaatagtaaatcgccaatcatctgtggttccagctgtaacattatataattatcctaacagtctatatgtagaacagatcaggaagaggacaaagatactctatgtgcaccacagtgacacctactggataaattgaggcttttctctgtcctttaggatactatggaaatcagatttggtgcaagaatcacttagacttggttttgatgtcagctataaacgtagatagagaaaatggaaagaagtagacctttaaggtctcttttctgtctccacttatttttttttggggggggggcattagctaacacatttctcactccatcaaaaattaaatatgaccattcacgttagttctttaacctctacaggtctcaatttttgcatttgtaaagtagaaattaagaacaattacttcccctggtttcataaagaggaactgggaacttcatagttccagagctgcagtgtgctacgtaatgattgatttggatggatggacttcaacctgactggctttagtacccctcatgcttcaaatgagaagagtgtgtcagtattggatgacagagtgggtctaagatcagaatcctgggcacacattttcaaaaaaaaaaaccatgaatgttgtcaacagggtagatttagtatttattaattataagcataattgattagggcagatagttttaaggtatccccagtatttgttacaaatgtctttctgcaagtagtaggctgcccatgctcttacacataacattgttttgtataaacccaactctagtattttgaagttctttacctagtttcaatgaggttactactggccgtctgctgtcatttcccattcatgtgttaggaaactgaggcacggatcaatttggattgattgagttagagctagagaaaagagcaatccaatcttcatcaatgcagaagcaaataacccaggctatacacccttgtgggacgaaaaattcattgatgttggagcaatcctgaaactactgtggtaccacagtgcacctattttcctgggtttgtttgtcatgtgtgccttgatatttattaccttttcattccgcatcctttaagtcacaagttgttgtttaaatgcttttggtaagaaatatctaccaaaaaaaaaaaaaacatgttacccagtggaaatattctggctttatcaaatatttgaataaggcctgaattctgtggaataaagttatcaagacctctatatggctatacaaaatccaaagtactcagactgccaggaatccccaacggcctggtgtaaattgctctcttaacgtctaagctattgtagccccagcttccctgtttgtataactaaaaaacattgactctgcagcagacccctagtcccattttacatgtatgtgatttaaaatgatacaatgtaacttctcaaggaatctccatgtgtttgtgatgtgatgaactaaaactgtgggttctgctacttctgtatggttccatttaatgtacaatttctttcattcttagtcttccaataacttgataccatggttctgccttactgcttagcttcaaatactatatatatctttcagcttctaggctaaatgccctgtcattcagaaagtcttacccgattctcttgggcataccttttcgctatgtcattcccttagaaactctttgtcctaactcagcctagtgattgctatgtctcattcctaactgatagcatgctagcatgcagcctattcttgaaaccatcagagactcagaataaagtttgccatgagagtatgtacgagtgtggaagcctaattgtagcttcagaacataaaggagacccatcttgcttcctctcaagaggtcttagaatttatctttctctatttggggatttttattgggctagattttaaatttctgcagatggtcgatatgtttgagccttgagaatcttagttgaacagaagaaaataatgaaagaagtcatgagtacaaggagctatccatagagttgccttgtttcaataatggaacacagaggcttcaaagctgcactatttctgagagagagacagagagacagagagagacagagagaatcagacacacagagacacagacagagacacagagagaaacaaggagaggaagagagagaaagagacagagagggggagagggaaagagagagttcacatttggaagttcatgttcattaaattttgtcaataatttaaattatatgtgtgaaaaagatttattacaaagtaactattttagttcaaattttgatctgaagtatgctgatgatgccatcaatacatccaatgtccagaaaaagcaagtttgagtgtcagggataagaacacccataagtgcattgttaaaaagaggacttgcaaatgccatatttctaaacataaagttgaatatgaaatgcaatcattcattcaagagataccattgaagaacatctgtttaagccttctggaagacatttttggaagtatgattgagaaatctattttgaatatagcaggcaccttcttatatgctctggtattcttcattatcattaaagggcatcatctgctcttagttttttagtgttttaatttgcattcacacttcttctataaggtcacctcttttactgagcttggtaaaactaaatctaattttagcttacagaaagcaatcaggaaacctcatgaagttgcagaaggcatgtggagaaatgggtattctgtattccgacactcctaattccaagaacacatttctttaatccagtgaaagcaagtcacaaacctaggccaagttcagatgagaggagaaaagtgtctttgagaactttcaggcaaggatgactttgaacctttctctgtgttcagatacagtcaacattttatatgatgcctaatataaggcttcatcaaaactgtgtgctatgatttctttcacttttgaaagaatgttagtttatcctgtataattataaaatgtatctgaatcagaaatgatttcttgtaaatcaaaaagtacttaatcgtttttagggagggagaactgatattgtgtccctccttccactcctctttctccatccctggtctttctgttcctctcttttcttctcatccattttgttcattattttctggagcatctctggtcaccctggatggtgtattgctcagtccctttgtccctctcttctgtccattaatctggaaattattgactattttcacaatgaaagatgaaagtcataaaaggggacttcaaagaaaataggagtggaagcacacgcctttctttgagttcgacacttaagagacagaagtgttaagatcactgtgaatttgaatccatcctggtttatgtagtcatgtagtaaggtccagaacagccatttccatgtaatgagaatctgtctcaaacaaacagaaagagagtggaggcaggctgtaaaaggaagcatgataaggaggtagagcaagggcattccagggatacaggatataacaaggcatgaccatgtttaggacaggatcaagccatttagctttagttacatatggatacaggaataaacagtaaagaggtgggcaaggtgaaaagattaatattagaagaaagcttatagagatagaacataatgaatatgcatttatattttatatataatgagtacacacacacacacacacacacacacacacacacaccacagttctaaaccataacaattccaaaacttagtgggggtgaagagagagtaatatgtgagattattcttatatttatatatgtgtaattatgtgaataattttgcaactctcagccttagaagctataaaagtccaagccaattaagaataccctttgagaccttgttcctcaactaacttgtgtggaaggtaggaggaaaattaccttgtatagtaatgtatgaatacctcactaataaccagatatgttttctctgtgctttatttgagacagtggagggaacagtgtagactctctctcttacccacacaaggcttgactatgaagagagcctgatgacaagtctaccttagtaattatcaaagtaagctaggagtaaaattacctctactcctctccacgtcttttggtcattcaggaatcagctcatcagaaacccatgggaaaggacacgtgagatgctgactggtgccagaaaatcccttgtctcatgaaatcacactcggtctgagaaaatacttgtatgtggaggtgtatggggagaaggaaaatgtgtatcatgaagttagttcacctgaaggccctcttgttttcagaggttatgcccctgttttattggcacactttggggatcataactggtcttctttttgaatccaaaatcagcagatatgacctgtgttgttggatcctacattctctccttctcctctttggcaagagcgcgacgtacagcacacaattcatctttttaatcaatgctttggcgtataggcatgaagcatattaattatgtccatgaacatgtcagcattctttcagatcactctgggaatctgagtcccttttgctgatatgtgagagtaaagcaaatattcttcaaaaaatttttcccatgaccacacatttgaaaatgaaatatgataaaatacaatgaatactgtgtaaattgtagaatatttctatttttataaactacacttcaacgtgcacacatgcaagcgtgcacacacatacacacacacacacacacacacacacacacacacacacacacatacagagagagagagagaaagagaaagagagagagagaagccataataaatatcctttcttccctgttctccaactcaaattctccctactattctacatctgatttaagcttcccttctttacattttactagaagtttctatacaccagaaccatcttctgaatggttctatgttcactctgccataaccaaggtttccttgaagaaatgggctgacatcggttccttagtatattctatccctgagaatgacgataaatttttcatgcctatcctgcactacaattgccacttgtaagcaatgggcagttgcttttgtctttcataatattacccagaaataggcgtagtaattttaaaatctaggtaaactcttcttgtggcaattgccagatacagcttgtacagaaccaactattttggaaattaaagtaattaggagtgtctaaggtagagagcaattgttgttccagcagctgaaccctttaaaggactggcacaattgctcccaagaccacatgatagtgcctggacggcattactactcactgctacacattgccctgcagtagggggttaataatgaaacctgcacaaagctctgtatagcaaacctattgtcatggtaaatttcattggccaggctggattgcatctatgatagcctctgatcaatgactaatatagtttgggagattttcctagttaagtaacatatggtgctttctgataagggcttatctaatataatacatagacccagcccatttttttcaatacaatctgttacatctattttacattaaaatatctcctactgcttttcccttcactttgctaagatagtattttcatttttatttagcacagtgtggtggttttttattgttatccttgtcagagcaactactgtcctgaaaatgtttcctatgctaaaaaatggctataacttgtaagtagactgtattctcattgactaaatgaaaaggctagggctgcttgggtttctttccttgtaatctcaacaggacagccttcaacatacacacacacacacacacacacacacacaccacacaaacatacacacacacacacaagctgtgcagtctctacttgcccttctcacagacaatgtggcaatagcacaatatggtgatattacataaaactatgatgaaatgaactgtggtagtaagtaagcatatttcccctacatatctgtgttcatacttttttttaaaacaaaagaaacaacttaatacccagaaaatatttcttgaatgtcttagagctctcaggttacatactataaatctgtgtccatctgaatagctgtgttacgacttcatttccccaattattgctaagtgggggaatttaatgcttgatatttagggtaatgtacctttatcgtctcttcctgatctctaacctgtgagctagatgaactatcctcctctcttagatattcctgtcatactgccataagcccttcaacttttcagttttatgtatatgtatgtgcatctgtataagtgttatatctaggtgcacatgttcatgtctgttcttatgtgtgtgtgtgtgcgtgtgtgtgtctggaggtatttgttatctttaaacatttgctacttcccagtgtaaatatggaattgaagagtggtgtaggaatacttgaattaatatttctctactgcatctaagataaagtgcatatttagcattgtgtggcttttttatttctcttataatgctgccattctatggtcctgtaaagtaggtataaggaaatctgttcatatgaaagggctttggaatgtaatgtggcatcattacaaatctctgtcaacaggcacataaaactttccactctagtacacgatgaattccaaacataataattatttgtcactgtacagtgaaggaatatattttagttttagttggtatagtattcatcttccctgtgcccttaccacatgagctacccatttctgtaagagaagaaaagagtggcaggttgtagttcatttattataaattagggtcttgacttaaataaatatttgaggctttctatagcaatgctaataattttctaatgcatagaaagtttaaagaaatttatgtacagactgctcccaattatttttacatttataaatgttatccttctctgactctaaaatttgtcatgaatagaacagatgaataaaacagagatgaaagacatccactcaaaaacatgagctctgtagtagccctgcagtcctatgtcctgtcctgtggatgaattaaatgttaatgaaattaaatgtccttatgttctacagccaatacaatccagaagaaacttcaggttttgtttaggcagccatattgatattacctcatggctgaaatctcacagcaaacttcatgttcttttggctcattaatttggcatgctatgattcctgagttgaatgcacatactaagatggaaggaaggaaagcttgttggatttgcatccctgacaaagaactataggcaattaagatacgctgaggaacctcagggaggattccccaattttatccaatactaagcgatcaacccagaaatcttatacatgcaagtaacattatatggactgagcaggttgcatttatatatttggtaacacacacacacacacacacacacacacacacacacacatttgtgacaacagtatctttgttagggtttccattgctgtgatgaaaccctatcaccaaaatcaagttagggagagaagtgattgattgtcttccacttttgaatcacttttcattattgagggaatccgggacaggaactcaagcagggtaggaacctagaggcagaagctggtatagaggtcacagaagagtgctgcccactggcttgcctggcctgttttcttatagaacccaggatcatcagtccagggattgcaccacccacaatgagctggaccttcccccatatatcactatttaagaaaatgcctttcaggtattcttacagccctatcttgtggaggcactttctaaaaagtgtgaggctccctcctctgtgatgactctagcttgtgtcaagttgacataaagctaactaggacaaacacttaaagaaataaaagctatgaagttgggagagaggaacagaggcacatgggaataattggagtgaagaaagagaagaggaaaaaatgatggagttatatctgattttccaacacacacacacacacacacacacacacacacatacaacacacacacacacacatacaacacacacacacacacacatacaacacacatacacatacaacacacacacacacacacacacacacacacacatacaacacacacaccacttgaggtggcctctgtcttgacaagagtccctccctcctccattgattcagttcatgtgggagaacaaggtgtcatcactctgctaatgccttatcaacctccactttgacttggatgacaaagaggcttttaggatttgcttttgattatcccacttagccattgtgtctttgcttgaacctgaaggatatgttacaacttggtcctttatattctagacttcatttatggctagtcatacctcaaactctcttcgtgcattacaatatgaagctttgaggtactgagttcgcagatggtgagattatcttaggcagtgtgtccacagctgtgtccagtactctctcttggtagtgtaaggacacctctatgtaaactctgagcctaaataaatagttctggttttcatatggcatgcatagatgcttgtctcactgctttctaagcacattttatatctacacttatcctgaaggtattgatggataactatcactgatttatggatacagattggtccattaaggatgtcaggagtcacaaggtggctcttttttgttccttctcttcctctttctcctcttcatcctgcttctcccccctcgtgatcttcattcttctatttttcgtttttgtttttgttttgttttgctttgttttgttttgctttgttttgtgttgtgggtcattgcttctctatgtagacttggttgtcctggacctcactctatagaatagattggacttgaactcagataatcacctgcctcatccttctgagtactaggattaaacacatgctccaacaccactgcatggcacttaggctgatttctaggaaaatgaggaggaaggcagttaggtgtctagaggtattttagtaggtctgatgctctttgaagataatatctagtattttgtgtttataagacagcttgtgctaaaccagtggtggtggtggtggtgctgctgctgctgctgtggtggcggcagcggctgtggcggcggcggtggtggcggtggcggaggaggcgatggtgatagaaggcaatacaaatgaaagtagaagggggcaatattttcgcattttgttaacacttttacaaatatagttaggtatctgatatttagatgggtatgtgtaaacattatttctttggggatcataacacttggaaggggtgtttttgaaccctgttgatttcagtcacctctgtccagtctaatcgtttttcaagtggaaacattgttaccataaagaaacccagcaccgcagtacagttgcagccttgccctttctcatatactcatttgtttccttactatttcccatccaccatggcacatttggaattattttactgcagcacgtgaaatgaacaacactctagagacagaaataatattacaccattaatagattttttccatttctactcagtttaatgttaagcttatctgattttttttttttttttttgctatttcacatttgcttaaagtctattgcttgcttgactaggagagaaaagcccaaccttgtttctttcaatcactttctatgttagtgatatcaagtaaaatatgtaatatctgtgtttctgtttttatcttacctgtctaagtttatttaaattgtcaagaataacttgcatccatttatgtgcagtttgctgcagctttaagatagctgtagaactttctgtgaccagtacaaaaaagcgaaaggattttccacacacacaaaaataagaatagtaatacagtattattaggcaataacatttctgaatacttatgtccaaagagttgcattcttatattcgctgaagcattatacattgtagccaagataaggaatcaatcccatttccatcagtcacaagaagatgaagtaaatatacatatctgaatgcaattcagcctttcaaaagcaggaatcttgtcatttgtgacaggttcaataggccagttagatactgagctaagtaaaatacataaggcacagataagatgaatactgtgtagcaatacttatatatggaatcttacttcagaaatcacagatccacagcagcagagagcatatactgctaggtaccagtaactgggaaagggtacacttagtcagaagatacaaacttctaaggaggaaaaataaactgggaggatttataatttagagcaatgtttccatcatggacttgaaaaaaatagactttaagtgttctccccatgaattgggggtggggggaattggggcaagtggatgatgtaaggaatatattaatttagcctgatttagatattccatagatcaattcatgatgttgtatactataattacattcaacttacatttgtcaatttaaatataggaaaataagatatttgaatagcctcaacgccggtacagaagctggtagcagagtccttcttgatggcagaggccaaattctaaagttgtcatagttcatgagcacaaacagtcgccccttagagagattctgaggacatgtggttgaagacttgcagtaagagcgtccaagtgttcagatcttcagccatgaataacttcccaatcaggcatgaatgtgtgtaacacacaatcacaggtgtgcttgcacgcacacacacacacatacaccatggatggagaaaaatgagtttgagatagtgagacatggaaagataagaggagacagagaaagagaggggggggagggagagggagagggagagggagagggagggaaggagggagggagagagagagagagagagagagagagagagagagagagagatctttgaaacagaattaaactctataacttactaccaaaagctatgttccatctactggtacttaaatacctcagaatctaagtcctaagcaaggacagatgatagatttattttatgtagcacttctttttgggtagggtctattctttcttagtgtctctattcctattttttcaacaacctctacaaagctctttgtcatgtaatatgtacacctcccttgcaaggtacattgtgaggattgatttttctggtctcacatcatgatctgctggaaataacttttaaaacatatatttgaaagatagattagggactaaataaacagctcagtggcagaaacctttctcagcgtatgagaagtcctgaatttcacccatagcactgcttaacaaaaacaaacaactagacatagaatgaatgaaaatagcagagtatttagtgtcaaagtggagaaaagcaaaatagaggtttctgcaagggcaacatcccaaatccatacactacagaagaacctggagtttatgccatcaactttgcatccctatgagacatctagaatacagtgtgtgtgtgtgtgtgtgtgtgtgtgtgtgtgtgtgtgtgtatgtgtgtgttttactctaatgcccctaatagccacatagcaatgaatatctttgctataattccattgaggagaatggactgctatcttttaatcttccaataccaaatgcttttatacaaagtatgttatagtaactgtattttaaaatttcctcagagtcagttaaatatgttccaaagattaacactgccattaagtaaccggaagggttcttatctagcaaaattattataaagtgaattaaaaattagatttcaaatccattagaaaaaacaggcaaattatgtgagtttcactattcagaggaaagaaactgtataaatgggtgatatataaaaagaaccacattcaattcagtgaattagtaaatgaatatgatttctaatagctgtggaatataatttttatcctgctagaataacacagttagaaaaagcagtgtttggtctcctgagaggataacacagccatcctcagagtaatgagtttgtccagtagcttacctagtgtctgggtatcattttgtagaattattaaaacgttttaaaaatgttttcaatcctcccccacgaactatttctgatattggaatctattttaagaaaataactagaagaatggacaaaattggtttctaaagccactgattgcaattaactttttaacaatgaaaggtgagaaatagcctacattactagcatatgaacatggctgattatcgtgtcatcataagagaaaatattatatcactattaagatataatcagataattttatcatagaagaggacattcccatgttgaaatcataaggaaagaaatgtagactaaagaagatattttgtcaatgtgatattttatttgtgtatgagaaaatatgacattcactaaaacaagaatataatgcactgaaatattaactataatctttttgggacttgactttgtgattatagtttttattatattttctatatttttaattttaaataataagtaactacatcttttagcacaaaaagatctttttacatcttttaggagaaacaagcttatttcaaaaatatacattccaaagagagtatttaaaaatatttttcacgttcaattaacttttgtgcacatacatatcttgcctacatgcacatcttgtactgtgcccatggacattaaaattggacatcaaagctcctggaattgaagttacagattattatgacctggcacatcagtggtgagaatggaaccaaactcttctgttagaagactcaggcttcttgatctgtgcgctaactctccagtccctaaggactgtttttaaccaatctcagaagaaacatcatgtgatttccaaaagcgactttgttgtaccatcttctagattgatatctaggaagaagaagaaaaaagatgctgggtgagaatgaacactttaagaggctagaagctgtactctgaggtggaaaatggtgtgactgataatgagataaagttgggtattcaataaaatagttattcatccaggaaaagcataaaagctgatgatgagtgtttgcttgggagttaagcatcctgactctggtaaatatctcatttcccatttagccatcaccacaaaaagactattttttttttccacagcagggaaggttatgttacaggatttgttattttgaaccctgaatcccagaatccctccaagctctgatagtataccctttcccaatcatgcttttactggccgggcaatagtgaaaggcaaagaaaggcaatttactcaatatggccattttagatggaagagaagccaatggaagtatctcacgactctcttaatccatcgtgaaagcactgacttgacctcttcctctgacgggcagcagaaccctggtgttttcttttccatgtataaaacctacaattcttggtgtctattattaatctagtccaatagctgagaagagaggaatgaatgtcttgcacatctttttttactgatgtagaaattataatactaaatccctacttatttgagatgtatgtccacccttagactataagaaacataaacaaatgtttggccttcctcattcctggacactgaacactgagagctttatttggaacatagaagaattttcttgataaataaatgactcagtgacaaatttattaagtttgatgtgtaattttggctgttttttttttttttagaacattcacttgtttttattttatatataaggatgtcatgtctacatggatctatgttcactctgtgtgtgcttgatgcccgtggaggcttcaatatgtcctagaaccctccaactgaagttagagagacagtggcgagcctcctgagtgttctgaaaactatcaaatacctttaattgcttagccactccttgagccctatctttttagttttgaagttcagccttgactgctcaggccactcctgtattagatactgaccatgagcttagatgttgaagataagtgcatgatcgctatcactttagcatctttgccttctttaacttcatttaagggaaatttagccttgccatagatcctcatttgtccttcaggacagagaaggggatggaggaagctaaaacttttcagatcctcatggaaaccacgtgacatctgtctctcttgtttccatgttttaatgtttattttgttataaaatacaatttttttctggtactattagtaaaagcagagttttaaaatactagaaaacttctcaactactgagctatcattctagccataatactctatcagggaattaatagttgcatgtacatcaatttgactgtaccagtaagtcctggatatatgtagctgaattagaagactaccagtgtaaaagaatatttgcccttacctcagtttgtaccaaagcctgttaagcgacaatatcaaatatgaagcatactattatatttgtatagcataatattcttttgtctaattatatattatgtgacttccatttgtgacaactgacatgtacttggtaaaatactgaaattgatgcagggtaatgcatattaaatgacttgcatatattactcacttaacctttatcatgactttatggagaaatgtgcttttatctggctttgcaaaggagaaaagcgaatgaaatacaactaactcaacccaagtgattattctgaaagcatacagtatttatatgccaaggggaaacatcccaggagtagaaatagcacatagtgtatgtgttgcacaaataattagtgctagaattacaattaccagtcctcagaaaattgccaggttctcccgagtagcatgacttttggaaaccttatgctggcattctttattttcattgtctggggtgacctacttacccatatcccccttgtagttcatcacagttggcattcggcctgcttcatctcaagctttgcaggaaggagatctgtgaaacgggttttgtttagagggtacacacatgaggagtttcagagcaaatagaagcgactctcagaccctggtccaacatttattgtcaagtatttccatctctggtctccagcctgtctgattctcattctccacacttgtcctctacgggaaacagagatcatttcatctttttgacttttaaattctgtttactagttggtacaaaagaaatatatgggatataaaattgcttcagtgtctagctaagaaactcctgaaagccagtgacagagacatacggagggaatttgaagctgttacccattttgttcagcttgtttagctcagatattttcttgcacccactacgttattaatttgtcatgtttggctagcacacaatcacaacggtggaaaaacaggcacaggtaacttctgctcgtgtgatgtttgaggtgaagttccaaacaagaccagggaccaggaaccaaagcttgctggcatccagaaggtttggaagatcatgaaaaccagggaactgttctaaggaaactttgcctttataagatagtgatcagaggagagagaacagtaggatataaaccaaagaaaagaaagtgcttcaagactactgtagcttcctggatgacaattgaacatctgcaacctgttaatattttgaagcacattttgcagtataaagaaggcatggccttttatgggtgtagctcatgacattactaggagacggtctgccatcaaactccctaatcttctggaccttccactccttccaccacggttccacaatgatccctgagcctgaggtgtgggagctgctttgtagatgtcccaatggactgggctccacaactctgcacttagattaattatggttttctgtaatgattttcatccattgcaaagagaagtttccttgatgatgtatgatgactacactcaatatgattgccaaaagacaaactgatcaatgatgagaatgataaaaaatctaaagctggggctggcgagatggctcagtggttaagagcaccgactgctcttccgaaggtcccaagttcaaatcccagcaaccacatggtggctcacaaccatctgtaatgaaatctgataccctctttctggagtgtctgaagacagctacagcgtacttacatataataaataaataaatcttttttaaaaatctaaagctagacagggaaaaagaccgtgaggactccaacttatgcaaagaactacaggtgaccaaaaaatgctgaaaagaggagaaatagtcttctccagtgacgaacacaccaatcggttattcagggccaaatggtcactgagaatatacacataactaatattaaatagactgagtcagttatatttaggaacatatatatgaataagtgtaaatgataataatgataataataataagattataaatttgaaatatatttaaaagaggtacatggagaggtatgggtgcaaggaaaggaaggagaaagtgatgtaattttattataatcacaaaaataaaagataatcagaaagagagaaaacatgaactatcattctggtcaacccctatgtacttctgttgtcaggttccagcagcgaagtctttaattgcatctctgattgaggatggtcacattgactgtgctcaggcaacagttagggagaattccctccttgagcaagctttgaatttcaggttgctcatcatttcttagccattatcaacgttgctgttactgtcatcatcattatcatcagaagggaagtgtcaagcctgtaattacacatggcacagtgctaagtgatacacaaggaggcacttggttcttgcaggccagatgtacataatcaaaacacactctatgccagggcagaccgatattaccagttcatgtagaacagatataagcacagaatcagctctgatgaggacttaattgcctgggcactgtttcaaggccacagactcttatttggtggctaaccatctacttaagtactacttctgatgactgctatgttcctggcaatgggctaagtatttaatgtgttgtttagtcctcaaaacagctctatgtgctaagtgctatgattattccaaaccaacttacaagaaagatgacaatgttaagggcacatcataaagaaaagaaagagtcactaatccgagataactaacctcagcttccacaagcatgacatccaaaccccttggaacctatgccaaggtccacagaagcagggaaaaaaactctgatgccctgcatccttgttagagaatttagtgagcagtgtttacaagaatgtagaaatctaactaggcaagatatgaaagaacaagtgaggaggaagaggaagaacaagtgagaagaagtgaggaggctttggaggcagtctccgaacttagatatgtaacattttttaattctgcaatgataaacaagcatcaagaagtttaaggagactgaagctgggtcacgtactaaagtgtcaggaaagaactctactgggaaaaataattatcctacccaaagagggttgggtggagtagaagagagcctaatcattgggataagggtcttagccattttaaatttgcttattttatagcacattcagcactaatccaaagtgggattacaattaagttttggattttctgatgaaaggagcctataattatatgctaattgtggactttaatcgatactgtgtgttctgatacttctatagccttctcccctcaacaggaacacacgcacacagacacacacacacacacacacacacacacacacagacacagacacacacacacacacagacacacacacacacacacacacacacacacacacacacacacacacacacacacacacacaccaggtggtgcttactctttactctcaataagttatatggataaaagatgttatctttgccaatcaaaataaattgagtaattagtttgggcttagtaacagtggttagattatttcattagttgtttttttgttgttgttgttgttggtggtggttttttgtttgtttgtttgtttgtttgtttgtttgtttgtttcaggaatgtgtatagcattcattttgagcaccttattcccacttgggacatgatctatgtaggtggaagtacttcttgtcagcagggtcattgctgcagctggaaattatagattctagctttcctttactaattccacaaaagagccctacaggagagcattagctctctcaggcttgtctcttcatctgtcaagcatctgattttcaaatgttctcctagtcctaatgatggtgtgcaagtgaatttaagccccctcccccaacctattcaaaggacagctacaggatttaaccacctgctcccagagttcagtaactagccaagatcaagtccttacctgcaaatcaggacttagaccttgccctgggtgttggtgttggctaaaggacagcactgttgttcataggggttaaacagaggcaaaggtgtcaataggactggctccttttcaactttcctttctcaagagttgaaattactgcattataagaattctgtttcttttgttagtacattcaatcttttctccgtgtttacatcattgacatgatggggaaatacctacaagcgcagaatgatctcctatgaacaatttttgtgcatctcagcacatgagtttgatggcttgtaggggatccttttgtcactatccctacctatactattccttccagctgaatcacgccacaccaatatttcagctatgtagaggtctcttgtcccttcctatagggtctcattatatatagtgtgaccatgacccccatcaggcacttcctgacatttaatgacatttattgttatgctttccggattagaacacgaagtctgaacttgggctcagaatctagataatttgaatgcaccatttaccttgctctttaacgggcatatgagctccagaatcagacttgcccctcagcgcctctttgcctcatctgtacaaaggcgagggctatctcacctcctggctctttcagttcctctcaagcctaagcagcagatgcattgctgaagcctgcagcaactctcagtgtactgtgttctgattgtccctagccaggggccatcactgggttctggtttgctagccccttgcctgcaggctatgtctgcagcagtaggacaggaaagcccatgggatccctttttccccttcctcttttgcatatgaaacgggcaatctgtcatgctggcagtcaatggcaccttgtgaaccccaggcttccttgggcaccatcattcagagactttctcattgtcccctgtcaacctgtgatgggcaggaggagaagaagagttcttttgacatccctggtggactgggaggaagatcctgataacattatgggatctgacagtggcagctgttcactggaccctttgtagtcttacatgtgggttttgattgagtgtgtgcatcttgtgcttggcaagttcttctgtatgacggatggtgaagataaataaacgtgatgccaattaaaagcactatgcaattattgttgtccatactgatgcctagcctgtcagaaagagactacacctacaagggagtaaaggtagtattttatattgggccatatgagaaaaaaatctctgtttgataaggctctatgatactttcaaagactgtcgttgtttcttgtcctcttcatatatgtataaagtcttattttctttcggtttctgtaaatatcattgcagagataagtaaccaatgtttttttcaatcttaaaattttccttcaatcttttggttggtctttgacaaagcctcgaaggtactaaaaagtcagagggaggtgaacatgtgcatgtataatgagtgactgagaaatggaacaatacactctttcaccctgtcatcccaccctgtgcagtgtcacatattttaaaccataataatttatgcccagacaagtttagaaagtgcgcagcacatctgtgcatcctctacctgatgataactgacctcgagcagactacaggaaataaaatccaccaagcctctgcaaactggtcaaatggtccagagttttaaagaggatgaactacaccagtctttgacctttggtacacaggggagtgagatatttagtgggtcggggatcataaagctaaataaaaatgttttattttaggttattaaactgtatgtcatataacctttaaaacagcacacactataaatcagaaacttgggcatataaggtaacttatcattcacttaataggcactatcatggcctttgcaactcaagtcacttctaacctttttctggttgaaattaacaggatccttacatcttgtttgttaaaaggtccatccacttatgtgcctctgcaccctccagctcagagttcagcaactgcttcttcatgtggccatagatgctgacacactgatgctcagcaagcatgaatagcatatctgccatagcatatgtggccccaaaggaaaccatttgagaacctaaacctacatgtatgtgtagtggacaccaagcataattctgtctcaagagaattttcagcccacggcactgcccctctttctagtttggctcctactgttcagcaaccataaagtacacagactacatgttttaacttgtcattttaggaagatgggataatttaaataagcatgaaacgaaggaagacatacacagaggactgggcaggactccattatctcacgcggttgaacatttaaagattatgacttctatatgacttgtattttaccaagcatatacaacaacaaaaagcaaccataaaagatgctagcataaatatgctaaggagttgggaaagaggtcactgtggaatgacacctggctagttgtggtgtgagcagggcttcttgaagctggtaactctcttcttgttctggcctcagatatggctcacctcatgaagactgaattgtataccatggttggcatggttttctatatcagtgaaagaatgtgcttagtatgttttattgatttgaccacaaagttggttggtcgtatgataatcagctctattcttcaagtgccacagagacgtggccagagataattgaacaaaattatgtcacaaaataatagttccattattttgttctcacaaaaattgaatttggtttaaagaagacaacacacgtgtttgtcaggttttaaatggcaacattgccactctttgtgggtactttccctgatttaagagggtatattcacagaggtgacaggcagataatattattctaatagtctaatatgggctatgcacacatttactattttctttaaaagttcagccactggatagctctgtgagatattgaagttatagttattgaacaaaggccaggcaattattaagtggaatacatggaagctgcttaggctattggggaaattgcacacattcctagaaattcaagatattcttcttactgttcctttgtgcatttaaaataccaatatactatacacgttcttcatctctgtgtcacattcttgttcattaatctttggcaagaagctatggagttttcagattatcttcagctctccgtacactgtatgatattagacatctttttgaagactgccacacactaattgccattgaacggtgcccttaaaatgaacagaattgcaattatgcggttttgtactatacaatctggtatactatactatactatactatactgtactgtactgtactgtactgtactatactatacataaaacaaagggcactttttgccagttgtgaaagactgaagctgtaaaacatgttatcagtaactgcattttaactctgaatcccaaatggaagaaaactcatttcttgtctctttcagtattggggatccaggcaatccttgacattatcccttgtattatagttacgttgctctgatttttgccgctttcttacttcaccttctccttgtttgtcgaaataactctgtgtatcctctttccttgtatcaacttcaattaacctgaaattgaagatgggttcatcttaagatctctaataacacaccgtataatcatactattaaataagtgttcacaatcagaggtgccatgatatgtatttgtgacatggtaccattcaagcagttatagagaacttactgaaaggacttctctaaaaacgttgtttttttaattaaccctttgcagtctgtaataagtaaaaactgagtgtctaagggatgaaagctttattttagttctcaatgttggagcttagagagaaaggttatacacttggaaatttatcattgaattgcctttcactttattagctgtgctgtgcatcctgctggggactgagtagaagatagtgcaattaagaaacaaagtctgtcctcatgtcatttattgtcaaaagagagaagcaatattaggttaaagaacagcaaaataaatctcttggagtgaataacttgaataacaatataagacaccatgcaaggccattataagaagtgaaggcccagcttttgatccagggtctaccagaaacattccctcaaaggaaatgctacttatgatgaaatcgagcatgatcaggaactagccaaatgcatattgatggacatttcaggtcagtttattggagacagaatggacaaagctatggctaggacatgttgaggaaactccaagtgataaaagatgaagtgtaggtactaagatctatatagagaaatatagttctttaggattcatatatatctttaggatttggggatcccctgtaatgggaagacatagacagttttaagcagaaaaacaaacaaaaaattctgcctattaaacataatcttgcttgctaatgttctgaaaagacattgggacataaatgtgatcccagtgggctatgataagccaatccagctgatacacagacctcagtgaacatgaagcatcccagacatataccttcagcttctgttgcatttagctgaactagaagacttccaatgcaatagatccctggctgaaggcaagcctagattgggagatatttgtacatctccataaattatataaagaattatttttttaaaactcttaaataaaatatagttttcatatagactttggatactgattgttttctattaaatgtggggcatttttttattgcgcttctagccaaaaataagaattttgtttgggcacatctgtgtgacctctgataactttgatgatagtagcacctaaaatctctatcacatacggaaaatactttctcctacttagaagtactggcacgctgaacctctgatctaacaggacatctaacacactcataggttactcggcaatgaaggctgtctttaacatttacctttgttttatatctagagtggatctggattttagctaaaagcaagggtatgctgagagtgtaagattaaaaacgaacatggtgcctcaacaatgaaaacaatttgatgaccatttagtaaaaaccgtggatggccctctctgatctactacacatgcatgggcctttatagacagaagtttaatgtacacagcttcttctttttgcctgtgccattgactgagagatttttgagcaattgactaaagaaaattcgttccctttcctggcagaaacatacagatgaatgccatagaactcccaaaagccttattacctgtccacaactgctatgcaactggggattcccctgttcctagagtaatgtataatcccaaaagaatacagagccatcctgggagggtgagtttgagcttaggggtggcttggcagaaggcctcagaaccatggctttccctctatagtattatccacatgagtaggttgcccctgtcaaaatcaacagaaccgtatggcaatgttcagatctgaaattatttcaaatgggttcctgtgtagttacaactctgtacttgcaatctttgggatttcaatttggaaagccattcaagtgaataatttaatgttgggctgctccttctgttatccattcaagctcacaaaattctaaaaataatgttgtgatgagcaaactctgtgtttcccaggacagtagggggttactgttcttttcgctccttgtataaaagattgtgctaaaactatcaacaaagcattgaagttgataagacaagtcttatgtacatgaagatggtttttaattcttagataacactttatcttgagtcatataatacaatttgtcttcaaatataccattgagcttattctgaaggctactcatttaacaacactgagttattagaatcacatgaattctctccagtcatttatttaaatccctgtttcttttccaagtacagttgtctcctgggtgtaaaggtatctcaaatcactcttgagaaatagttaggatgaattttgccttcaattttatgccaaaattttacaatacactcattttattggatgagcattaaagttctttaaatcttattatgaaaacattcatcactagacaccctgaccaaactcatcctcctacctcctgcttataattcctgaaacagtttcttattggaaatatttcatttctacaagatgtgctaacatcagcctgtttggttgtttccatttgaggtgtttcatactctgcactgtgtcaaacacagaaatgactttctttcgtaactatacacattcacttttattgtgagcccccttttatgatactcttaggcttccaaaagagagatatgttaattttaaaaatatatatataatttttcagtgttttaaatttggaagagaatatagtccgattgcctctgctttcctgtagacacatttgttcctattttaacaattgcttgcactccatttttacaatttaatgtacttctttcccccattattctgctcataaaaagcctctggatttttcaagtgcatatgtcagtgttttcttcccaagtagttcatgtagactcgatgtctgctcaggtttgacagtttgcctgtcataaactgaaccctgctgtgactaccaccatgagtatcccctatgtttcatgccatccttcatgaatcgttcatcaaaaaggttaagggataaaactgaaactttatatatcaaaaaatgatcataggaaatccttttcctcaccaaataaagaaaaagctacctatgaatattattttggttgtcagtaatctcccttgatctccttcaaatgactccagggcagcagctgtccatctgcaaaagaaataatcatctatgttgtagcatgtggctgtataatgaaataaaaatactttctaaagatatttacatttcctccgaggctaagcaaacctttcatgggtaaagaagttactggaactgtgcttgtatacaagaaatgctgagaaagctggtatttagtagagttatagccctattgagagctactatggtcaagacacatctcatttcccaaaagcacaggattgtcccttcaggtccttgctctgtctttggaggatgccgatataaatgtaaagactaggaagttttctcaagtgtttaaagctcttgcaaggacaccaagagatgaaactagtgggcaatgcatgaatatttgtctcatgaataacagaggcacataagcacagtctctccttatggttacaaactgtgccctgtctgctaccacaccaagtgtggagactggtggtggataacagatattttctcatccagttaagtacaggtaggaaaaaaaatgcagataatttcatacttcaaaataagtagaaggaacaacagagataaagtgggtgatcaaatctgtccagcttatagtatgataaacacagtacagtcagtatgttaagcactataagaaataattttaatcagccccagatcatagttaataattattttctgaaatcatggaagagaaagagagggtaaatgtcttggttcaatcacccaaatggtttgtggcagtgtttgagttcaagtctaagcattcttaccttcaaagtctctgattgcacctctccttagttactttatctactatcctcctccttttgttatctagtcatccctgtgcatttcgaccttgtctcacgacacacacacacacacacaaaatctcccaacattgttttcatacatctctcttcattttctacttatttaaagcatttctttccaaatattttatatgttttgctagaacccaggtctcacatctccaaatataattatttgattcaaagcacaacataaaggataataaaattcaagaattgtgccctgattagtccatctattataggctaaatgcaatgaccaaattatatgccctctctgtacccaagttttcatctacagaatgaagataatggaggtaaccaaataatagcagatatgtgaaatgtgtgtgtgtgtgtgtgtgtgtgtgtgtgtgtgtgtgtgtgtgtgtgtgtgtaagattgtataatatcgtatgtagcagatttgaagaatgacataacaatagaagctattactgaccttatcactattaatcataattttgaacaagaacctgtcaattctgggaaagctctaaggcttaaattccttagcttaattgttttccagttatgggtctaatagagagggttagcttcccatatcacacatgatgtttgatacaaataatacaccccataagtaggcactgagatcatactcacattgacgtgataatatcacagtactcagaaaacagtaagaaagagaaagccaaaatcactgcctatagaaattagcaactcgttttcattttctgcattttgtgagcaggaaatctttttctgagtttgctgtcatttcctgatcttgagaataatggtattcttttgaagatatctatggctggatggcatgttttaatagatttaactgggacatttcttatttttctgaggctgctctgaactagtaaattagaacacttacaggagtcagaaaaatagacttagaaatgaaacaaccaattcaacatgaggctgatagtgcaatggataacagagtttcaggattctacaaacttgatagcttttatctatttgctatttactctgtccatcatggagaaaaaaaaataaagatcacattcgtggtataatataatctggtaggtggaccttaaacatttacttttaagcattaaaactactgagtttgtaagtttaggagacagagatacttttattcatttacttttatatttctttatattgaaattgctaaatccactaagtagagaaaacatgtgatctgaaaattcaacttgtcatgaaatataaccaaatactgctggtcaggagggaaatgctactggtagttcttgctggagtcacatggctgaaagcacactgttattattggttgcattgtggattggtgttattttgagttctgtttaaaatatatatttgtgttccaaagaaccaaaacaatgcatttttaatctgtggcccgtcagccttatcgtgacttatattttttcaagaaagattaatgttgtgtttgtaatacattagctatttattttccaactcttccatgtcataaaaataatatcatttatacacagaattgttcccattttctcagttattagacaatatttgattcagtgtagatgggattcatttttagggtatttatatatagccaccaacaaggtagcttttatatggataaagctgtgatctctgaatcccagtttctgagatttgaagtacctttctcctattcttctgtaattctgattattttctcctttttttcttcattcttttctcccacccaccatgtatatccattcttttgttttaatgaatatgatagaaaccattgtgaaggcacaattaggtgaacacaattaggtgtccagtagttgttactgatacaaattattctatgcaggtgacttcaaagttctcaatcttgtcagagaccattactaggcattagaaaagtagtactcaatacagccctccctgagcatgcaaagatttctttatgcagtgcttttattcttcccttcatctcttaaagtgaggtgtttgcctttcttgtccaaagactgatacacatgaaaatgtaagagtaggatcactgtgtgctgatgcatctcccaggaatgatgagaggcaatgaaaagagacaagcacaacctatttgaaagatgatgccctcaattccctgttaagatggatacattgtaaatgggaacacactgctgaatattggcaggcaggtcattggaaagtctggatatagagaatgataacgttgtgtctctgtcatgtcttttcattttgcactcacttgagcaattgcaggaatgcaagagctagtgcatcagttatacaaagggcccaaatgaaggcccacggatggatgagtcctgatggccaatagctgacagtgctcggggtcctgaaggatgactgcattgactttttgcatctttcatgcaaacgaggatttgacagctgtcaaaagggcagactggtctctagaatccccagagatctatgtgaatagcatgcgtttggaggagtgattccgaacactaatgggctctgagaaccacaaatcagaaagcttgtgcctctgagacccaactcaccacagggtcagattcggggaaaattggattttaacaattgaatttatttagctttttccctttaagcataatctctaccttgaataaaattgttataataagggagagagagctttagcacaataggaagcagataaggcttaattttgtagtctgctttattgttgttgcttgctaatgtgcctgctttgtgctcatgcccacatttataagggaagccacactaattatcactcccatgatgcttctgtctccttcttactgcctgattatgggaactactcctgccttggctcctttacattcagattttaatcatgaatcgttccttcttgtgaggttagcattttggatggtggatcaatgagtgaaggaagtatttaccgatcttaatgtgagaaaagtagaatgaatggtcgtggtccacattgatctgatttatctcggtatcatatgcattgttctggttacatcttttcatgatggaatcgttagaatcccagacctggaagagactttaatcaacttgttcaaactcattctatgtagaggttgaaattctaaccagaaaaacagacacttattcaaggggaaacagtcagacctggctcatcgggaggagaatcattgccttatactctcttatagttgtctcaaagtattgacttaagatctatgtagaatgtgcttatttcaaagcatatgtaatggcaaatatctaaataaagcaaaccatctctttaaggtgaaccttaaattcacatgcgatttttgtttgaaagtgaataggatcatagttcttagttggcaataagttgggccttcactggaagatattagtgatattttagaccttattagtattcatactcctggtacctggattttattgtctagagactaagctaactgtaatgaacaaatggaataaatttcctgtacagcacacattttatccccacagcagtaatctggccaaagttgtcatatagtcaccattgagaactcctgaagtacttacgtggcattgcagaaaggcaaaatattcacttgttgttgtgttgttttcccattggtctatcatggtttttacaaaataaatccagccccccccccaaaaaaattagcttctgtaaaatctaatacccattttctacaatagttatttgaaaatcactactcttttaggaaatatatggaatcataaagatgttgataagttactggattctaatcatgtgcctttgcatacacatctcacagaagtaagagtgggtaaagctcagcagcaaccaatcagaactgatttttggatgtaaacagagtatccctgggcatgttgccagtagcagaagtcaagtcctctcatgcatgcatgaacacacatttggggaaagaccagtaaggagagagccctagctcaatcctctcatggatgcaatgcactagccatctcaagatacctttctttctgtgttgccctcttacagttgcttgagggaaaataaatgctacaatatcacctcacactctaggaactaagcattctcagacgccattggctttctagagcttaatcttatcccttgttgaaaacaaaccagtaggctgacgataccgcttaaacaatagaataaaatttgtccatctgtcattaagataattgttattgatttgtccccttgtaattttctgccttttgtttttcgatgttggttataaatcacacccacaccaggcacagagcctgtatttgtgactattatgtggtcctgataaggctgggcagcattcttccgttcctgatgcaagttattgagattgattgaagcgccttgcttgtcctatcccaaacactgtgtaattaatgcttcattatgttaatacatgcaaatgtgagggtctgtgtttgattgggaggtgagagaacaaaaaggattaaagagttcactccaaagtacaaattaatttattgcattgctaactggcctctgaggaatggggtaataggcttcaagaaaaaaaggaaaaaatgtgcagaataaaaagcacagttatgtatctttcacaggtgctatttgtcatagttgttggatacaaaaaggtcattcagtcaaatgacagaagcctcagctgagtgatttcagtagaaaaaaatcctgtaattttatttttatataattaatttaaaatattaattatataaaattatttaaaatttatattaatttgaaatgattaaaattgaataataggtaatatgtaattattcttataaaattaattatacatttatttacatcccaaatactgctccagtcccagtttcacttctcattccctttgcctctgagagggtgcaacccctctgtgtatcccaccctggggcatcaagtatctacagaattaggttcattctctcctcctgaggccagacaaggcaggcctctgctacatatgtaccaggagccttagaacagcccgtgtatgttccttggttggtggctcagtctctgggatctcccagtggtccaggttagttgacactgttgttcttcctatggggtttccatccctccagttccttcaatctttgccctaactcttccataggggtccctgacctccatccaattcttggctgtaattatctgcatctgtctcagtcatctgctggtagagcctctcacaggacagctatgttaggttcctgtctgcaatcacaacatagcatcagtaatagtgtcagggactgcagttcacccaggggatggatccccagttggacaggtcactattctgccattccttcagtctctgtttatttttgtccttgtatttcttttagacagttgaattgctcaacgatggtgatatggaccctgaagatatcacatccaataatcaaataggacccctagtggagggatggggacaccaacccacctacaaaacttttgacctagaattgctcccctctatagtgaaaattttaaggataaagaaacaagaaactgtgtttgtgtgtgtgtgtattaacgatacaaattgtgtagtagacccataatcatatttcatatttcagcagttgtatgtgctcaatgttgatgacataactttattttagacatgttatgaagggaattttaattaggtaaaacctaaaatgatcattctcttattatcagatggttctttctgatccacacagtgatcttttgattatttcatagtatgtctttatatgtatagtttgtgagttccttatttattataggtaacattatatatacctgcattttctgtgatatacaaatctataatgaggtttttgtatgttttagtaatttttatttcactgatttactattatcattattattatagaaaaattcttagaaaaggaattactagtgcctccatctttttatggcttcaaatacacattagtgtctttaatagcattttgtgctcccaatatatcacatagagaccaataactggttgctgaatttcatcaagcataaccctccattaaactgtcataactcttgaggttacccattaagtcaagttgtgttaacttaatcacaccatcacaccttttgtgagtaagggttattgctcctctttgcccactagatgatactattttaaatacttttttttttgtacaaaaagcatgcttgtaattccaacatttggactttgaatcaaatctgggaaatttttgagttctaatctaggcaagcccaggatttgtcccatgtgtgtactagacagaaatccacactttaagtagaaactcaggttttgtggtgaaggaatctggaaactgagaactgcaaagtaaacatagattttctccttcagtattgacctattggaaacatttagaggaatgattgcaagatgcaattgactactggttttattgttcattttatttgatttcatttctggtggttacatcagagtctacaggagatgatattatgtggtcctgccaaattctcttcttactgcctaggattgctttactcctgaaattcaggggtccaaaaagctaagcttattaccatgtatttttatttatttaacttatttatttttaagaatttcatatacacatgagtgtatgtacacatacatataacctaattagttctatttaatgttgttcatatatatatatatatatatatatatatatatatatacacacacacagggataaccactgataaaacaaagtctttgtccctcagcatccatttgctgcctggaggttttgcttagaattaggccttgtgaaatctgctccatctgtggttttgtctcaactggtgttaagatggcatgggtcttgtccagggaaccatattgttcagatttcatggcttcagcttccctgtcatatatggaagattccacctagcaggagacatcctggtcctcagcttataaatctcacttcttcttactaaagctttaggtataggtattgtattggagaaatgaagtgtgcagatgtctgatatagaaacaaaattaagcatcagaaatagaatcttcaatcaaagatatttggaagtcaatctcattcactgggatgactatagattattgactttttcaccagcctttttttaaaaactagcctaatataaatattatattgcaaaattcaaaataaaacaaggagtatgcttgtatactgtttcacttattcttcttatgaaagaaaaagttttaaaatgtaatttatatttgtacagtgacttgtttttctgttcacaggatgtggtcacttgaaattcattttaagttgacaacaaaaacatatcatatttgagttcataatgaatataagcaatttcaacccaacctgttttctacataaaggccatgatagaaatcttagttgctgatattagtgctgattggagaggattttcagacccatctgcctatctcaatgccaagaaacctctatggttggccataaaaactgatccctgagcgtggtggggcagaagtcccttatgacacagattcaagccttgttcttccatccttcttcctggacaaagccaggagtgttatcagcacctacataactttctcccataattcacctgtcatttttccagacactttgcatattgacaggttgattacattcttattggtccatgctctcatatactttggcctatgtcagtttggtctatttgattttagtacacttccagtccaggcaacacccatgtttctaagtcacctgtgtaaaatagttcaggaaacacaagcttcttacctgtagatcataggcttctggtaataggtagacaacacttaggtgaatactagggaggcattgtttctccaatgtgatttaacccaaatgtgaaatcctgaaaatgttaaatgcttcaatgttgaaaatatatattaacaatatattgaaatttttaataactgtgaatattttttcattatttgataaatagacttctgaatttgtatcttcctttaacattcataggtagggaatctagaaaaatcagcttacacatgtcctgataactgtgtttaaaaagcaccatttctgtctcaaacacggtttgcataataaattataagaggattcactctgctaattaacctgaaattagcaaaaagaaaaatgcacaatgtcatatttagcctttccttgagtcctaccaccatgttgttaatgcttattttattctaaggtgtttgtgcaggaggttgatatggaggtatacaatagcagcttcaagtaaaagctatttttaaaacagtgcccaaccatgacactcagtgtatcctagaaatgcttgtgccttgtatccttgtgattgtccaaaatacctttagtctgtagagactaattaggaaagagactctgctcaacatgaggcctgaagcgtgtgaggcaaatagaagacttacacacagggaccccatcagtgtgcacatttcctgctttctaccctctggattcattgaacacattaaagttagtaagacattttaattctccttgagaaaaatatggcctgatggtttctgtctatctagtatgaagctaaaacaaaacagaaaatgaatttcagcacttttaggcaccatttttttttttgagagatgagacatgggtatggctacctatgttgaagaacacatatcttctaggctatatcaaagtattgatcacttttgtttgttacgtagtttattacttctcatattattacttctcatatttggccatgtgggatggacccagacttacttagacccatgggtatagccatgagaagaaagcagagttgaatagtctctctaataattggatatttattggatgatatcctggggacctccttctcattttgcttccctttgttagtccatatttgatactctggttctctaatccgactttaaaattaccgattaggccaagtgtgaggtgagagattctgtgcaatcccctgagccaccctatagacactcagaatgtgaacactagagtaaattttctgacataaatgctttccaaaatttatagttcaaaaatgtattttataccaaagtatttgagtagtataggatgctccagagtatgctttttctaagattggaaatttatatgacaaaagatttaagtgctataactggacttgatgagtttttctagagccacagtagctaagaggaggtctttattaaatatttcagtcaagatcctgtgtttctgtataattcatctctgaattgtttggcttggaatattttatgaatctatacttcagaaaacataaggaagggaaagaaaaattagataaccagaaatattaagacaaatcctccactaaaattgagcaagctagatgtgattactagaggctctcttaaatagttggctgtgatcaaacagttaaaacacctgaactttccaccctcatgcaaaatgaagttaattatccttctgatcagtaagatcccaacaggtaataggtaaactctgattcatcttgaatacagcactgaaaatactggaaaacatgatgagaaagataatgcccattgcctgtaggactttacacaaaacttccacacatccctctgctgagtcatgggccagaatggtgtgtaatccaatattcaccttcactccacactatagcagaggatagaattccctgcctataattggttttgattattatcacttatttccatatctatagcattcattgtctttttcatgcaaaggcaagggcaaaattttcataacttttcttggccagagagcaaaagaataaaaaggaaattatggataaaattagatttatttgattacagtacaaagatgctaactgacttaataaattttatacaaatcttgtggtttgaaattccaatccagacagatacaacagactgtgttatctaataaagagcaatagctttagtgttctcaaggtgtacattaagtccatagattctctctaatctgcaggtaatatggagtaaaacatgagttagaaaagagctgtgtaaggggagtgaattgcacattaagcagggacacttgacaatggtcatgagtgacagaagctaagcatccttggcacaagcatcatgggagtatttacgttgcaatagctacggtgtgtcacactaaataaactcaacattttctgcttttgattatttttcacctgaaaatctgagtatgaatttccttttgaggattcaggaaaatacacagattcccctaaatggagttagcacttttctctccttcaaggagacctgctgtttattattttgatacagtttagacatttactagtcctgaatggtggcactcaggagattatttgctttgattcttacagatattttttttcttcttactagagctgatgtgagagaaatgcataaagatcaaataggacacattaatgaaaagcagctggacatgaattcctctaaagtgattgaaacaagattaaacagctttgggatactaagtgccatctttgcggcatcatcctcaatacaacttgcctcctctctgggactgcatgttaccaaggcatcttttgaaatgctcactgagctgtgtcagaaagagctcttatgatgccttttacaataagaaaattggagtacatttcccatcatcttaaacatacttttatgtaagccaaaaaaaaaaaaaaaaaaaaaaaaaccaacccaaacataatcaagattattttttaaaatcattaagggctttcatagagtgctgttaaaataccaggtgtattatatatcatcagtaattggaatatatcatacatgaaattcctggttggtgtgtactgtttgcaaatgaactgtaggatgcagggaattggacaacggggatatggaaggtggtgtcagccgtcttagactagtgactcttgaaaggtttgaagaacctgaatgaataccaggaagaactaggcgtctgatcttagaaataaatgaattaaataactaatattttggagaacatcacttttatccgtagtcaagagattcaatgtcatttgttaaaccttgaaagaggttatgttgatagcctaaaagtgtagagtataaaggagaatggggaatgatggcaaccaaaagattggaccctcctcactatttagagcatcatcttcctagaagatcagtcaacgtgagtcagatttggcctttggtctgcttttaattgcaataatttatgcagttggaaagatttctaagatttttgccaatgtgtcactagctggtagcccttataagtagaagaaatgtatgattctccatgcttatgttttttcttttttcatgtaagatcatatgtgtaagaccttcatcatttaaattcatacagatcatatgtatgtatgatgcatatgcaaagttcagaagtttcttcattcctttaagtatgcaaagtatttaatttcatagcctggatcaaaaatcattgaactcatataaatattctggaggggagagagagagagagagagagagagagagagagagagagagagagagagagagagagagagagaatgaatgggatctttgaacaaatcttaatctcctgggcagtgcaaggctcattggctggcaatgccaaatcttctgtccaggttattatcaacatggggtttccttctttgaagtcaccatggtctttgcagaaacatagcatttttctgtgtaggcaagatatagtaaatatcaaacaaaatgagtgacagtattttaatgaaaacttttggcctccgttttttgagaaaattggacttgttataatacaaatattttatcagtcagaatgcctacatcagacatcatgccacagtgtcagcatcgagttttactgaatgtttaaggtcttccctggatatgtcagacggttaaggatttaatccttcctgtttgtgataggagtttccataagatgaatagttcatttctcatgaatcatgataagccagcccatgctttgtcagcagtgtgacctctgcagtcttttattttcaagagaaaaaagatcagactctattttatggctaacgaggtctgttctgggtcccatggttcctccattaactacatccctttgtggtcttatttcagattgtgaaaaaaaagtatcacagatttattgaggagtaaatctcttcatagaataaatttctacctaaatttgagagtagtttttctacaagtagtaaaaatggtagataatggattctgagacaattatgatatgtaactgtgtatattctaacattttagactctgtgccttgttttattgatgaggggattgatccctatacttccatgcacacttcgaagtttagggaaaaaaagatcagccaaagcccaagtctcatctccacctgggatgaaagatttccttttaaattacttttattgtcacacaaatggtgtaattctctctgatgatttgcttagagttgttacaggctcttttctttgtttagttactgaatcttaagtctccatgaactctacctgcccaatgaatgctatatttggccatttcttatgatttccactgcaataggacctaatcccagcatctctcatctcactttaccaatctctttgcttctcaaaacaatgattttgaactttttgacaacaggtttgttttaaacttggacctgtttgttttgtgggctggttaattgactctggagagcatctgtgtggtctgatgtaagatgtaatacagggtacctggacttgagcactgactgctcttctgaaagtcctgagttcaaatcccagcaaccacatggtgactcaaaaccatccataacgagatctgacaccctcttctggtatgtctgaagacagctacattgtaattacatataataacaaatacaccttaaaaaaaaaaaagatcaaaactgtctccagacattgtcaaatgcctctttaggaaagaaaccaatccccattgaaagaaagcttctaagaaatataagctaaaaatttgggatctcttctctcctgctctcagtgatccttcattgtgtgtaggtctaggatggagtccccaagagattcctcctttccttgttatcatgtcaattgatattgccagttggtgttcaggtcttatttaggcagccacattgatgagatttgatggctatagcttctctgacagttctaggaaaggaacttcactgtaaatgccctgtttctctggccttgcaatcttccactatgttcctgtgccttagaagcaagagttgtgttgtaggtgcattggttgggctgagaactgcattcctagttgttttctgcagtgtgatcagttgtgactgtctataatgagtgctctctcctgcaaggggatggttatcagaaagaaaaaaaaaagcccccggaattgttgaccaatgccaagtgatcagtcctgaaataatatgcacaaaagtaacttgatacagacctataaggttatatttatatattttggagaaaatatgtatgtaacaaaaatttggaaatatagaggccagggatctgagagcagcagaaagcttcatggaaagggttggaagaaagaagtgggaggggagaacgctgtcattatattctcattcaaaaagcaataactcttaaaaaccaacaggaaaggaaaagaactaatttcagtgtcccagtcaccaaatcctcacacataaacttctattcctcttactctgaggtggactagtaagggattaaaaaaagagaggaagataacttgcactttaccgcactggggaggggaaggttcaaacacagggcagattaagcaacacatagaagtttcccttttaagtgttaattttgcatgggtctgggaaatgatatcctagatgtcaggctgtattacctgttgaaaagaaagaaaaagaaacccattataatttctccagttatcacacagcacaaatcgagctgagacttaagagatttagcccttgaagcagaaaagggttgggaaagttactcaccactccaatgtggctcttatcatatttcttccccattggattttgccagaggacactctgagacttgcctcgggcacactttttgccctatggaagcttcagatctgcacagagaaaataccatgtgccctgaatttctgatatggagcctctggtgggttgactgagagatttttgctggggctgttgcttttgaactgcacatcttatgtttctatttctgaaatttgttcttgtcttgtaaagggagaaaaaaagtagggcccaccatatgaagagcaaatcgggatcagcaacctctacggaagacatttggtcttgtagcgtgatgtcagtgaatggcctgacattaaaatcactccctgatttctcatggtggcatcccgcaagttcattatgtacagctcttggaccactatattggattatatgaatacatatgttgcttgtttactttcactatgagataaaatgagaatcttatagaagacagaaggccagatgaaatagagtataccaaagtctagttaaacttgagattcctgggtgagcatatagagctcttatgaactacatggaaagcttcatatttaaaactgacacactttgggacagggatgatggtttatttttaaaagcatacactcctaatctagagaacccaggtttgattcccagtaccccctccatagttcgcaaccattttgatctattcttttatttttgaaagtcctaaagaatattttatttgtttgtttgcctgcttgttggtttgcttgtttatgaacaaagactagcaaggtcttgtttgctaggtaaatggtcttttaaaaaaatccttctgaattcccttcatccaacttaatgaactctatgtcttttgtgtactgaaagccaaactgatggcacacattcagttccctatagccaaatcagaccgtgtagaatagtgcaaaccatgaaacagcaagatccctggaatagcttctgtgggtgactccagtacagctgctggaatcttgccaacagatggccagtgaattgggggaggggactcataatcatttgggttttttttttgggggggggggtgagacagggtttctctgtgtagccctggctgtcctggaactcacttttgtagaccaggctgacctcgaactcagaaatcagcctgcctctgcctcccaagtgctgggattaaaggtgtgtgccaccactgcccgacttcataatcatttgtaatccaagctatctaacaccttcttctgacctccaaaggcactagacatgcaaatggtacacagatatacattgaggcaaaagagccatacacacaaataaactgaagaaaagaagagaagagaaaaataatgaaaacacaacacacaaaaagtactaaataaatttgagttcttagataaacaaaaaaatttaatattttagtgtaatatatctaccagtatttgtttttcctaagggcttagggcatattcactattatgaaagactatttactttagtatatttaatgggagatacattttcttcctttaaacttttcatttaaacttttgttcatctctgcatgccaatgattatttataaaatgcacctgtttttcttccaggaatatatttttctttgcattatttacatccagggataaataccgaagaccaaattcatttctgattcctgtttcttagtaagcaaaaactaatgttatctggtgttgaaatctctctagagctagaaagggtagagtcttcccaacagataaccaaatgctctgaatgctagttatgcatagtttctcaaagaagaatgaaaagctgaagatgctgtaatacagactaaggactcactacccagggtgctcagaagccaagagtatagtactgattttggtgttgtctgtgttttatggaaagacatttattccaatttccaattttttttctttctgggaaataagttgagctacttggctatgtaaaaatatttgtgcagatatccaggccttatctcgattcactttcactcacttcccttgtgtttggcctttggtgactatacatgttttgtttttccctaatcatctgatattagacttaggccaatatgacgttcagagagtgcctcttcagacaatgcagagtaagcatgattgtggttcggccatcttgacactagattggactaagagacacatcatgcagtgacatgtctgacactccaatgttctagaaaaccacaagtgtactgctgagttagaatcaattaaaaagaggggagaggagtgaaggatatacaaaatatctccttacccaaagccccttttgggagggaattgtcactgctacaactcttcaaaagacatagttaatagctgtttgtttaagttttgctcaaagcaggactttctttgtctacttaatcaaggtttttgttgggggtggggagtgaagagggggatcctcagcagggttctggttatacaaaagggatgtctgatcctgtaaacattggtctatgtcttggctccttccttatctttcttcagtcttttttttttttaagatattttctttatttacatttcatgttatcccctttcctccattcctctcggaaactcccccctcctgctccctagcccccctctcccccccactctcattcctagacctggaattcttcagtcttttaaagagaagtttgaaatgaagtattaagaaaatgtttgaaagaaagttgtcccaattactatatattttatatatacacatatataattgtgaacaagttgtctgagaaacaccataaccaccctgtggtccaggtattacctccttgtgaacagagctattaaacttcagttacttgtgagtctcctgaaaggactaccaaacacaggttgctactcacaccccttatcattctgattgacaggcctttgcactgtctacaactatagctttagcttgttccctggtggtgttgactttgccagtatgaaacctatttcaaacttttttatttttatctactgaacccccatgatattcatgtaggtttagatccgttgattccttcttcttcttcttcttcttcttcttcttttttttttttttgtaatggaatttcatccccaagttcatttcatagccttgatattattttacagttttgtcagaactaaaggccagagttactgtgtcacatatccgtgatctttggggaatcccaacaaaggttatatctctcgcaaaattattttaatttccttcaacatagatttctttgtctaaaggaggggtggtggtaccagggttatctggttcagttatctgaggatttgggcaccatcaaaacttctgagcatcttaaagtatatgtgattttaaatagatgaaattatgcaaagcggttctgtggggatttgtgtgacattttctaatcttgggcactttcagaaactttatttcatatctgtgctgctttccatcaatttgtcttttacatttcatggtcttacctgcaagctttcacactgtggactcagaacaagattcctgattccactgggaattatttttcactctcaacaatgtttgatgttttagataaaatgtcatacagccatttgaggttaccctgcctatgtgataatgggatttgatatgagcaagaatatgacatggtaaggagattaagcacaaagggatataaacttacaaaaacaggttgaaccctgaaatatttaggagagttcctaaaatttgtttaagtacaatttctacctctagaaactcaggataacttgaaagtacttgtcagttttatccatttttttcttgttgcaaaacaaaatactgcccccgcccaattttatgtagggataatatattttggctcacagttcagaggtgtttacaatctatcctggggaatggggaggcatggtggcaatagtgacaaggttggcttggattggtgcatgctgttaaccaagaaaatgatgattggagatgtaactgcaagtctggttttctgatcactcctccccattttagttgagtccccttttagttgggtccccttttctaagggatatacccaaccatgaacaaactggctttacccaccttggctttaccctcctgggaacactctcaaagacatgctcatatgttttttctctttgtgaatataaattctgacaagttcactacatagaataattatcaaaactcttttgtttctgatttctttttgtttttttttttttcatctgacaaaactaaaataagtgatagttatttctgctttggattgtctttaaagaataggtcctcttctgcaagagaacacagacactattatctgctcaatacaacccctaggtagaatatatatatatatatatatatatatatatatatatatatatatatatatatattgctttcacttgtgttttggctaaaggtttattcaagtcaacatttggagagggcataagctagagaaccacgtttatttaatacctttattcgcgagccctgtgtttacatcagtcctgcccctccttcttcctaactcctattgtctctccacctcccaaattcatgttatcttctttaattgttatgttacatgtataaacatgtacacatagccatgcaacattctgattccactagtactcatatgcacatgtgtccagagctgtccacttggaactggacaaactatgcagtaactatttttctggaagaatcttgaagtggaaaggtaagcgttctctggaaagtccaatgaattgtgttttgctggggtaaatttgtgaaggaacatttcgttaaagtggacacgggtgtaaaaaactcgtgaaggaacgtttctctaaaacagacacaggagaaatgatattctgctaaagcaagcacatgaaagttcacgtgatgaaagattctttgctaacaacaagcatgtattgggtctgccttacattgcttagttgagctacatttgtcaggataccatagatagaaaagcaccaaaacaaaatggctggtggtgtactgcagtttgtttcagttgcttcttccaaggacttggtctgattagatccatgtgttgagacaagacctgtgctgatgcaagagccaagctgaggcaagggccgtgaatgacaaatgtttagagggtataaataggactggatggacagcgacagagaaagagatttggcttcctggtacagctagctgtggaaaacttgtgggtctcgagtctttgctgatctttgcatccctgagagagacacagtcgagaacttctcctggtattcctgttgatgcctcctgctgacttctaccaaggctgaggcctggctgtttctgctaggtcgtgtcactactattgctaatctgactctaccgaactggactgctggtatgtgtgcaggtggattgagctgccactgcctgtgaacctgtgaactgaactgctgatttctagacaactcagatgagcattgctccaaagaacctttctaaacaggtccacattccccccactccctgtatcctttcttttccagtacctctggtggatggtgggctacaggagaggttaaagtttcaaaacttctagggctgaaatcatgtggaatttcccctccctctatttgtgtgccaggtaaatgccattctgcaagctgtgttcacccaatcatagaactgatatttgcgggtacatttttccaattataccgaggaggaacggtcaagcagcagacatagtaggctcctggctcttgtcatctttcctccccactgttctgtgactgatttttccctgagccttttgtgaaagagttgagttgcggatgtaccagttgtgactgagcaccccatagtcactttcttccacattctgggcagttgtgcctctttgtacttgtcgccatttattgcacatagaaatgcctttgatggagctgaaactgtgcttatctgtgggtataatggaatctatttagaatactgttagaaatcatgcagacttaggaaaatgattgtagggactcctctcaggtttatgacctctccaaccactgtggttagtgagctagtgttaaagaataaggcattatttccctcccattgagaagtagttaggtttaaatagacagctgttggttatcaagacattggtgacagtctattttagggacctggctaggccagtcattgttaaattctcagcctttccatctgggacgtctcctgactgctcatctcccttggcagcttgcacaatatcttctgatactatgagagccagtgcccagggaggaggaggccttttgatcagttccaggtcaatgcctccaaattctgtattcaaagtttgtggtgtcttcaacaatagagtcttacattcaagaagtcagctgtattggctatgtgttttgcttctgtgatagaataccataactcaaggcaacgtcctcatacaagtgtttattttggcttacagttatagagaaatgaggatccattgtgtcaggcagccatagctgcaagtggcagacagtaaagtaagaacaggaagctgagaagtcccattaaatttccaacagctccaaactttgtctctgtcactcctttcatgggtattttgttccctattctaaggaggaatgaagtatccacccattggtgttccatctccttgattttcttgtgttttgcaaattgtatcttggttgttctatgtttctgggctaatatccacttatcagtgagtgaatatctaatgacttcttttgtgattgggttacctcactaaggatgatagcctccagaatatccatttgtccaagaatttcataaatccattgtttttaatatctgagtagtactccattgtgtaaatgtaccacattttctgtatccattcttctgttgagggacatctgagttctttccagcttctggctataataaatacggctgctatgaacataatggagcatgtgttcttattaccagttggaactttttctgggtatatgcccaggagaggtatggctggatcttccagtggtattatgttcaaatttctgagtaacctccagactgacttcaagagtggttgtacaagcttgcaatcccaccaacaatggaggattgttcctttttccccacatccttgccagcatctgctgtcacctgaatttttgatcttacccattctgactggtgtgaggtggggatccatcccataatcagccactaaacccagaaactattgcatatgccagaaagattttgctaaagggaccctgttatagctgtctcatatgaggctatgcaagtgcatggcaaatacagaagtggatgctcacagtcctctataagatgaaacacaggtcccccaatggagaagctagagaaagcaccaaatgagctgaaggggtctcaaccctataggtggcacaacaatatgaactagccaatacccccagagctcgtatctctagctacatatgtaggagaagatggcctagttggccatcactggaaagagaggccccttggtattacaaactttatatgccccagtacaaaggaatgccagggccaagaagctggagtgggtgggtaggggagcagggcaggggaagggtatagggaactttcaggatagcatttgaaatgtatataaaaaatctaataaaaaatctaattaaaaaaattattatcctaatactgcaaaagaaaaaaaaattcaaacagcaagcagaggggcaaacaagaagtagggtgaggctgtaggaactcagatcccacccccagtgaaacattttctctagcaagaccatttgttctaaagatcctcagacaacattgtcagatatagataaggtgtaaaaataccagagcctatgagagacatttctcttataaaccatcacagctaacaagggaaattgatatggctcatactgtttttgaagacccttatcttttcctacaacaaacaatgtgagaactgttaagttttttcatgcctgggactggggattttcttagataactcactgctcttaatgggaatactactacacatgtggcataactccattaatatgcacgtatatagacacatgtaaatacacacacacacacacatatatgatttatttaatgttagtttacaaaatattgtgtttccctacagtttttctgaactttcttagtgtttctgttgatcttcttttctcccctcctgttgtctctctctccagttggaaccaccacataacccatttaaaaaaaaaaaaacatgttaagagaaaatgagaagttactaatctacattaccagtgattgatacattaatggattatttctcagacatgtgaggcgccttacaagagggtcagagacagcccaagcatcacgtatgctgaaacattaacattaaagtcatttgtcatttttcaaataagtcttctcactttgggtctgtcttttctaaactgttaagtgaggcaagctccagaaagcaaagagctctcataatttcaaagccatatatttaaaggataattgttataaggagtacaaaaaaagctcacattaccaacaagcagcaagggtaattgtattacagaaaaattaatctttacttaacttccctaaaccatgtactcacagcactgaaaactgtcataacctcctgtttcagagtaaggagattatttatttgtgataatgggcacaatatgctcattaacatgctgtcataaacagctgtgctaaatgtattatgtgctctgtgacataaataatgcactcagcatgaggtggtgtttaaaatacaggccccgggtagaacaaaaatgcaatcaatgtcttttttttctttaatatagttgcctagtcttccattctaaatttatttcttctgttttaatgcaacttaaatggaaattgtgggcattattctgatggagcatcttgacattcggtaacattataaatcttgtaagctttcccacccttggtgcacctccagccaggtatttgctagaaagtgtgtctttcttataaatgagagggaagcaattgacttagaatctatatgcatttcggtagactgagtaggttcccttgataggtttcctcgactcattctgtgtcaatcctttccacaataggggctcaactgaaagactgccgattaccatgggtatgtccaatttgcattgaaggacctgatttctgagaacatacagtgacagtgtataggagtgcacatatttcaggcttatagacaggaaaagaagttatagagtcagactctcattctgaggtactttcaactagagaaacagacagcttctctgcaattgagctgggcacacagaagttgacttggatgggaaagatctttagttggccttgacaggatcagattggagacatcagggtcctttatctttatcactcagcattgctatgattttgtaatcaatatgagtttgaccaaggctgtagatgtttcccttgggtaagtagcctggtagcatggaagtaacatctgatcagaagtgatatacttcactggccatgccccagacttgagctccaggtttagaaacactgggagcggggaggggtgacctgggaaccctggggacaaacagctgcagtacctccatcttccttgaagatcaggaataattctgacctcgagaaccaacttcggtcagtacatgatgatcatactgattacattaattaaagtgtctgtcatttaaatcacagaaagctggcaagttttcccaaaataaccaacagtattcccctcccagatatattaaaaatgctaatgaatctgtggttgtcatcatgagagaaatgaaagctacagcttgatttatgggtatgttttatgaaaataaatgtagcttcaaatgcataaacgtatgccaccatgaaattgttcatcacatgtcttttttacgcaaagtaattcaggagaaagtgggataaaatagtggtcaaaaactacagttacagtttagcaaagatccaatgttagaaagaaaacatcaagggatattgtagaactgttagcctcagagattgtcaaaattgagagtatcttgacttgaatgatgtaggtgcacaactgtcagagcaaaatgagcaaacattatgacctcctgaaaacttgtcaaggccttggatttatcaatcagagtactaataaatactatactaaaatgcagataatgagattaatcaggtccaccatatcttagtgatcactctattgattggtcagatttaacatcttctggttttatgtgacaagtactaattatggctgtctaaagtttacaagtaatgaatgatgtaatactattcttatctatagcttatgaattattatcttttctggaaatattttcaggactaattgtttcattaattggtgctcacataagtattagtcttatgtttaacatagaattcctgttcttaaatttatttataatcacaggggggtaaaacaacaagaaagcaattgctttttgaaaattacgacttgtgaggaaatgttggagaaattgaacttgaagcttttcagactgcatggactcagttcctttgtgttctcttcttccaggtttccaaattaaacctttcacgtcacttcattttgtgtctgaaccttcggatgctgtcaccatgcggggaggaaatgtcctgctcaactgctctgcagagtccgaccgaggagttccagtcatcaagtggaagaaagacggccttatcctagccttgggcatggatgacagaaagcagcaacttcctaatggatctctgttgatacaaaacatacttcattccagacaccataagccggatgaaggactttaccaatgcgaggcatccttagcagattctggctcaattattagtcggacagcaaaagttacggtagcaggtacgtagatctttccttctcctccacgtcttttatccctttgatcttttgtaggaatgagaaataatccttgtaaaaggaatgcacattttaagacttattatttttaattaaaacagtaaccatccataagctgctgtatagtcctttgcaattatatcaagctaactttacatagttttgtgtggtgagaacatttgaaattactcattaagcaatggcaaagcatgcattgcaattataactgtggtcactatgctaagtcatcagtctagaatatctatgtttcttctctaaattaatactctctaccactgtaatacccaccccccttttgtccctcaaccttctaacccaccaagcctctcatgattatcattctgttttctgagttcagtaattcagattcctcatacaagtagaaacatgtaatatttctcttttgctattttattttccttagcatagtatgttccggtttccacatggggtctaaagtgacagagtgcttcctttttatgggttgatgatgttcctttagtcatgtatctcacatctgctgatggccatgaaggatgactctaaatgggcattgtagcaagtactacaggaggcatggggttacagacacccacatgtctcactaagtgcaatcctaggtgataatggacctagtggtgggcttatagttctgatgctgtgcataattttagctttctgagaaacatccataatgtcacctattaattttctaccaacaatgcacatttgtaagtgaaataagagaagaggaaggactcataggacaaggtcgtttttactaatttttctttttcaattaacatggagaaccggcaggtgccgctcagcagtgtgcccagcttcatgtaatctgcttttacaaccaagctgacttatagggactcaccacttgcatgagtgggtggacacttttttttttaatacgattttagaaaaaatatatacactattcaattctattttacagactcagtagtgttaaacattcataaaatcaatgctgtaagccctgacagcagtacattttatttcaatctgtgtcccaatccataacgtagacctcaagtgagacataaaaacgtcccattagcactttcaagtgcagcacccttattgacatgcccagatcagtgccaaagagtaagatggacatttttctcttcatctatgaatatctaaaatatgcataaattaactaaatggagcagggcgcttttgagacccaggatgttgctgtatccattccaacttttcagtcttctaagcatttctggctgctcatgcagtactagatgcatgtggaggggtatcacgtcattctttttactagtgtctataatgacttgactgtgatgtggtctttgaataggtgctgcctccaaaagggggtcatatagcaagctaaaacatgcttcatgacctgtggaaatagccagtcaacggggcgacacctggatggagccataagggaaccaaatagtcctgactctctaatctcggaagagcggcttctataactgttaggaagaatccctatcctactcaatgtatggtcttttgttatagcaaactaaagtacacccatccatatccagttacatcaaacttcccctcagctgatgtgttcgcctgggtagttggctatcagcagcctaatggccagccattctgatttgcccagaataacctgggtttgacatttataagtcccatattcttggaaacctttcaccggccaggcaaaacttggtccatcatattgaaaggtaatcctgcgtagcttagcaatgacatcctaagaaggccatggctctcaacctacctaatgctgcaaccctttaatacagttcctcatggtttggtgatccccaaccaggaaattcataactgtaactttgctgctgttacgaattgtaatgtaaagctctaatatgtaagatgtctgatatcagaccttggtgaaaaggtcggcctgcccagaagtggttgcgacccagagaatgagaaccactgtcctgaagagagcaggtgggaagatatcctgatcatgactagcaaggtttaatttacctgaaactggtgagaggtgagcttttggaatttcactggtgtacagaactcagagggagaatgtgaatttaataacatttgtaattaattaagaggctcgtgtggagaagtaggaaaagtttttatatctggggagagggacatgcactttgactttctgtagcatgtacgtttctggacccatggacccttcccatcagctcttacagggccaaaggccctctgatgatagaaatgaagcaagctgtcattttgatgctctgttataaaaggcaactttccctatactgctaatgaaaatgtcctgaatgctacaatttctattttcctgcaatacaggttcagttttatgttttcaccatttcagttgtgaagtgacgaatgattccttccctgtgagatattaaaataaagtggctttgactttagtattctgtggaagggtaggctcggggatgtagtcattgaggtgcagtctaatattagattgtatcatttcgatgcaataaggctcttcacagcattttaaacacttaccatgctgttcagcaacacagaatacatcaatgttatgtctgctggggttacgattgccaaaccactagaattcacaaggggcatatttcttccttgcaataaagaccatagtcctgatctaatcttattttaaagcattagcagtcaataaaccagttaacactaaaaggtaagagtcagctttgtctgggaaaaaaacataaaaataaaataaaaataaaaaacaagaaccaaaaccaaaacataacttctgtgtaccctcaggtacagtgtaaaaagccttgtaatgcaatggccctcttcagctttgactcgctcaatgtgtttgttttgtggttgtagttgttgttttgttttgtttttataaaaaggaaaggtggcaaatgaaatcactcattgattccccagaatgctttatgcagtcatcttgccattcatcattcattctgtttccaggaacctctcaagtgctctttaaatcctgagtacacacttcgctggagagggaaagagcatagagaagataagggggtgggaggtgcacaatcgcaggcaatatcctttcaaaggttgcaaagtaacaagctaatgaaaattatgtgggtttttttcttaatatggttttgagttcaattagtaaagaataatggactctccaatctccatttgaaagtaacttgacggagattggctttgggtggggaattttcatcctcatagctctaagctaagagactgcagtcttttctatgcccacatcagtatagctaggaagttgagcttgagtggatcagcaaagctgccttctgttttctcacaggttttccaacttttgtctaaatgcatccattgtgtttagttgtaggcatgtatcctgctaatggtggtgtgggcattggcagcatctggagagttctgccacagctcactcttttcccttcctgcttctttactttgcttctctccttcttcttcatcatacttgatcagatttaagtgccctcacagctgcccatttatagatacatccttgatagagcaacatgttttatatctcaattatcttgtcagttcaaaaccatagcttctgcagaaggaatgatgcaatcttggtcaaatttaagtaatcatggctaagagtacagattcaagcgcccccgaataacatgttttatgatggaagagataagatggacatttacaatcacagaaaaataagttcataaataaatgaatttatcaaaagcattgatgggagcatcagtaagtatctgctaacaaagtgaagaaaacttttgctatgtattgctcaggttgttacactcaacaaactttgcttaataatcatgagatagtaggacaggtaggacttgctaataatggattattcaagaattttgtttctagatctattgcaaaggcccaatcagtcattcaaaccagacaggagttttcaaaacactttttccctcacaccatacaaacttctagatgacttttttagcaatgcattatgctgaaatgtctgttccacttcaaaataaaagtttgggctaattctgtgacccagaatatcaagataaatatatacagttttttccttcatttgttgacagtttctgagtgtctcgattttggccatggcaactgtgtacatttgtaagtctatgtgtgggttcacatatgtgtagttcatgtggacagcagaggccaaccttgggtattgctccttaggtgctagcctcttgttgtctctcactggcctggagctggcaaatgcatctagattaatgttgagttataggtataatgctttatctatgtatgttctgaggatggaacatggttgtatgtcaaacaacagctctatagccactttaaatattatctatattgtaaaattatagtgctgagtagattatcacttaacaagaatagcattattaatatagctaataattataatcatgatactattgtgactattatgttatcattgttatgaactgaaaattttcagtaatcctagttatagttcaaaacccttgagaagtcgacgaaacacttactccagtcaaatacagtaaataaatgttatatccttaaatcagagaattgctattgtcatgtgtggctacaagtgggcaagcttgaattagatttcaaaatgttcaatcaacttatgatgcttttcaaaatacctctagctaaaacactcatttctgaccagttgatgtataatcctgtcaatgctgttaatataaatcttattgtccacatcagaagctctcactaaagaagtattgttacagttcctgtggaagaagattctgggtcattctcttagtatacttaatgtccttgcaaaaggtttactgaagcaggatttgtgatgtgttgtggtgatttaggctctgaatttcacatatatgttctcttcctccagaaactcattcataccagtactaaagaaaagaagttatgaacagacttcctgtaaataatcatgctagatctactgcaatttatttttcagtgatataatcatagcgaaatacatacacacacacacacacacacacacacacacacacacacacacaccacacatccctggtaggttccaaggtacacacatggaacctaagagaaacttctcgtccttagattcttagcgatggagttgggtagagcccaatgatgagacagctctgtgtttagggagatttgatttttgtcaacgttcaaggatttaaatagtcatattaaaacacctggatttgctctgtagagctctgcagaagacacatcgatcagtaagtcctcactcataattcttaaaaggtatgcatgctaaagctggcaggcagaacagaatgtaagatggtatatgattttctatgaacacagactggtagagaaattctccaatacaggacatgaaacaggctcccatctcttagcttctcagcacagctggaattaacggccccgggtaaccttctccttactaatcacacaagcatgcactttaaaaactcagtttaagctgtctaaaatgcaaaccaaggaaaaataataataaaagtaattgattggacttacctgttttctgaaaacatcaattctatggagaaaaaatgacaatttcttctagctgattttactatcaaagctgagtattcaacagagatatattacaaatctctctggaaaaatagagaacctgcatttgttaagtaaacatatgtgtcttctaagaacacactttacttttaagcgatttcaggctttaagacaagattgcatattttttttttgtcctctttcttcaagaccaagacaataaaagagcaactaaattttatttacttcccttgttctgtcatttgaggagatgttttccttttcttctctcgtacaatagatatttcaagatgcaaactgctccattttgcttttaaataatccaggcattataattaaaattccctcgtgttttttaaaaataattagttacatgaggagttgtttctatgaattcccatccagaatgcctcccatttaaatgagttatgaaataattaggggaggcatattatggtgagagaagctagaatgagccttttgtgaaatgataacctgacctttccattcttgcttaaaaggaaacaggagaaaagcttgtctgacgggaaggagaatacaatacattgcctcgggtcactcaaatgttatagaaagaaaacagcaaggaaaaaaactgctcatattcttttttctctacaggagcaaatataagaatcttgcctagaaggtcaagttcactcagtgacgcagtttggaaaatgtgtccccagaccccggaatctctgaaaagtctattttaggaagattcagtcaaggagcaaagcttccatttctccctcacaggagtgctgttgactgtccattgatgagccgagaaataaactataactcttaatagccttaattatccccaatttacctaaataccctttgtagcttgtggttaaaacataaaagagaaagaacatgaatggaattgttttgtgtgtactagtttacagggttttttttttcaaattattattatcaaaccttgtgtaatcgctgatattgccctcaacttaaataattgaacttgaaagagtaggattttgtttctcaattaaccatggtaataagttagaatcaaaacatactcctgagaggttgggcagatctccttcagtagcaaagggagacagagaacttcctaggcctttcactgtagagatatcaaccaaacgaaattaaatatccaccagtctttcactttctctgcattattatgaattctaattcatgtggcagtgctaattatcaattactcatccaaatttaatctgcctcagaagaatggtgtgcgttgtgtctcctgttatgctgctcacagtgtggtttttgctggtgttctcatggaaagggcgcaatagataaaatatatcaggtgataataaccacacgtttttcttttctgtgcacgacttgaagactatcactcatctatcacagggtttgtgatatccctgtgtctatcacagaggcttatgcgcgtgtaacaaatgacatacggataggaggaaaatgtcatgtttgcttaagtaaagtcttgccgggcatgtgagccttgcaaatgaaagcaatgaataagggtcaagaaaatatgatctgcaaaatagctcagctatgatggcgacaatctagaaggcactcagcacagcctgctttctcatggttttcctgtaccttttacatctctcctcaaggtatgagtccgcacatccattccatggatatcttacagcatacttttgcagagttagatcacgttaattttacagaggaacagtggaaagtcaatggttggcttgcaaagtgccttacgttggggtgctatttcttgtgaagcaccttgaattagcctaagcaacataactgtacatctttatatctctaatgaaaatttaggagttaaagaagaacatttttatgctttaataaatctggagctggccttgagatttttgtaatttttttatgatacattttagcaattcaacaaaattacatgaagatctctgaaagaagggatttgtttatgtgacgtacaatttttttccacatagtatcaagtcactcaaacctagagaatgctgtacaaatggaagagcatactggaagagatggtaggcaatgtcaggctgcagaagaccaaagtcatctcattcttttcctgtcatggtgaagagcaaagggcctgaaggcctagcataaacacagttgcacactgattttttttcctatcagagtcagtaatgtatatatttgaaaattctgagtaaaagtaatgagcacaattactcatgtctcctaaaattattaccttaatagtctacttattaatttatatctgtatttatgtaatctatagtaataaaagtaattggccacttgtcccataatcattaaatatgtcttctattagagatgagagaatagttgtaactgagtcactgtaacccctgaagccaatgcattttcttattacaccgagtgacttggtttggatagagagtcatgagtttaacaccaaacagaaacaaaataacacatttttcatagcaaaaatcttcctttattacatgctgagactaagtgtacacagacacacacagacacagacacacacacacacacacacacacacacacacatacaggttttgattctcatagatacaacccacaattctttcaatggtccataaacctcagcgccagaggtcagagctgttttgttttacttgaaaaacttgctttgaaaaccttccaaatctttttgcactgaatttatctcagtttcttaatgtaggaattttctcgacataaaacttttatatgaaggcactggataaaagtagatcatatagagctatggggctctctgctggaaggtggctaaatactgatattatttcccagaataccatgactccttcagaatcatagagtaaatgaaatttcagagtttggtagacatcagtatgctgtgagtatatgagatgctgtctgtcttctcttctatcatgctcactagattattaagtttgcacaatatgttcccaactgaactcagcctaaagcaaatatatgtggccatcaatacagaagaggtacctcccacttacttgcctctctctgtctctgtctctgtctctctgtctctctgtctctgtctctcccctctccctcttatttctctctccttccctccctccattcttccctccctgtatatcttaaatctagtgatgaactctccagtcccaaaactcaccatttgatttataacctctgcactgttgttctattgcacctatttctaaaaaaaaaatgctttttacagaaaagaaaataagttttgttgtaaccccagggctctaccacccttacaaaaggccactcctggggttcatttagagtggttctacctggaacacttcatcaacacgaaacccatgtaagaaacaatgttaaagattaaagctacctatacagattcaaccttaaccctcagtcatgattgattttattgcactggatatttttgtggaacgccctgaaagggaattcaactctaaaggctaaaatatgatatgagaaataaggaagttgtattgttttgttttgttttgtccagacactctttgttaggtccgttggtgtgctgggtgcgttagagcccgacattatagctgtttctctgtaatcatgtccattagagtcctgcccaagagatcatctcagttgaaggacatcatagaacatgacatgcatggacatcttggccttactccgatattctcattgcttgtttccagaattcacatcatagtgagaaattgtttatacactatgtaattctttctttaaaatgcatgccacgcttactagactgttcacagaaatatggaaccataacaactgtctggttgtgaaaaactgtcccagtttcattcttccatttagctacctctgagaaaacactaatctacaacctgtctttattggttatgttttaacataaaacattattattttaacaagaaatattgttatttggcttattttgttacttagtgatgtatcttgaagctatttctatgtttccttatatacgtttactttttgattgttatatagtagtccatgatttgccattcctacaccgatatttcgcttctaatttccagtggcacattaatgtgtatttttgtattttgtggaatctcatatagaatatatttgataagctctatagaaaaatcattagaaaagcaatcactgagtcagaacatgagcatataaattgatcacggcaggcccaagatcctccttttatctgaacctaaatatcagaagctagaatttaataccatcaattaaacaaaaattttgaactccatgtccctgatatatgatgctgtaccacataagcacaccatagaaaaagaggaactcttgctagtgggttaaaggctcttagaagtctggcctgtgcctgtatctttgaactcatgtaaataactgaatctgcctaaaccatcagtttgtttgtttatttatttatttatttattacatattttcctcaattaaatttccaatgctatcccaaaagtcccccataccctcccccccacttccctacccacccattcccattttttttctaaaccatcagttttaaagaaaggctgctaagcacacacattgttgctatctatttatttagatatttagtttgtatgtttcatcttctcatctctcttgctaacacttagatttttttaaacagaaaatcctaattatctgctttcgggtatctttagcccatatgttataagaagttctaacctcttttttgctgtctataacttgtcaaaatacagagcatgcaccactgtatcttcataatgtaactacacaaatgcattttcggccactggtcaatgacttaataaaagaaaatggactgatcacaggggcatctgttttagcttccctggggtgtcaaccgtctgcaaattctattagctgaagggagtgacctggtagttagcagtgttcagagacagccatgacttggagcctagctctagctgtttacttcctgtgtgaatgtataccatgcgtggcttagtttctccagctagacagtggagtaggggggcagtagatttatcctgcaaggatgttgcagccatatccttgtaatacttagcagagaggttagggagcactaggaacacataatgaataattctgtaaaacagacaagacttaatataatgttattccctggaaggacctaatataagagaaactcatgaagaaatagtcttttcctgtggagaagagagccacaagccttgctgtcttgctctctgtgagcatgtgatctgtttctcatgtataggcagttagtccctgcccaaaggagtcctgtgcagaaaagagagttcatgtgttcttcttacagctgtttgtgccaggcttcttcagaataggcacatctacctagttcatcaaacttagtaaaaagagtactatactaggcaatacatgtcggatcctcagaattttatttcagttgatgatttggaagtacatccctttcttctcactctgcaatactgagaaatagaatttgtgaaggcattaaaaaattgtctctgtactaatagggcaaaagacccttttccttccagaaaggcatgtgaactgcactttagccagtttcccactggctctccgttaacacatcatgactgtaaatggccattaaagacacaagatatttcttagctttagagacccagtctaaagacccagtctaatttaacagctatctgttcatatacatcttgtttagttactactgacttaggaaatcatcccccacttgatgctattgttaaaacactccagctgtagtcctagtttttcagaggttctaaatgtatttcttctaacaaagctatctcccccacccctctaatttatacaaatatctataatgggaatgtttcttttttaaaaggcttttttgaaaagcttttcctagaaagcactttaatgatcagcattatttatgtagactatataattatgcaaacaacttaagcctttcccaaccagaactcttataacttcacaagccttcagaaaatgtgaataagattgcacgaaaatgccccgatacacattttagtgctttggaaagcaaacgtgagtgcagagttgagaatgtgtgtggctgtgacaataacaagaatgcttataaaggaagcactgtagcaaatgctaacacatggtggaggagagaagcaatttggtgaagtgggagatgctaagtgttttaatttacttccttgccagtaaaatcttgtaaaacacggcgacatattaaattttgtataccacagtgtctccaagagcctgtcaacatttccattatgaactctatttccagaacttcatagtttgccttttggatttcaccctggcctgacatttgaagtgcaaggtcttacctggggaacatgtgtttcacgtgttttaaaaattatgagttgatccatttctcatttatacagagtaaccttttcacacattgcttagctatgctgcctcaagtactgcttgcaggcagacttatgagaggcaggtgaataataaggaaaatctacagatctggtcaatacattctggcctgtggcctttccttactgaatcttaggaccatatttattactgagccaatcatagagaatacagagtccattacaccgtcttcctcattttggcctaaactgtttcacctgaggcatagactgaaccaaatatcttcagacataaccttgattgactggagacttcttagtctccagtctgtttgctttaacatttgtattgtttcagagaagccagaagacagttttctaaaggtttgcagtgttttctccaatcttgctgttttgatctcaataatccctgtcacctctcttctctctctcttctctctctctctctctcttctctctctcctgtctctcttctctctcttttatcttttctctcttctctcttnnnnnnnnnnnnnnnnnnnntttatcttttctatcttctctcttctctcttctctctcttctctctcttctctctcttctctattctctctctcttctctctctcttctctcttctctctcttttctcttctctctcttctctctgctcactctcttctctcttctctctcttttctctctcttctctctcttctctctttcttctctcttctctctctcttctctctctctcttctctcttctctctctctcttctctctcttctctcttctctctcttctctcttctcgctctcttctctcttctctctcttttctctcttctctcttctctctcttttctctcttctctcttctctcttcaatcttctctcttctctctttatacacatgtgtgtaaagatgggtatttctctcatatctctcacattcaatatattataatttttaacaccaatattaataatttaactaccctcctaatgtattataattttcatgatctgcagttaagtctaaaaattacttttgtcaaagttacaatcaaaggaggggaataaaaagacaatggaaaagaaacataaacaatatcaggctttggaatgtatgcacactgggctacctagaatgtgtttcccaaaggatcaaatctagaaaatttgtaaacactaagcaatctctcgatgaagagaagggcttctgtcatcagctctagatgattgtaagagatgtctatgaaactgacatttttaatgtgcattcagtgttattgcacacccacaacattacttttagaggtggctgtcaaaaccatgttcaagggtgagaaaactcagaatataatcctcagacttctttgaagcatatgaagactagcattttgccccatactgaaagacagtgttaatatttctcattaccaactgtcaattaagttattaaacaatttccttattcgccaacaatcacacatggtaggtttggacctaggattcaggctccacctctttttttttcccaacatatttttatttatacagacatattattttgctttatatttttctacgaagaatgtttaatgcctgccctctaagtggcttatatttttttttgtggaagtattaggatataagaacctgcaaatgaaaataaatgaaagtgtgaaaacatttgaattcttagcattctccaaattcaatgtgagaaaagtagaatgagatttaattgatttcctaagagtttctctttcatgttgtcttcccctctttctctgtcttcttgttggcccggtggcagagagagcatccaatctagccagctgcctagccaggtgcaaagaagacatatgctttcaccaacactgaccatttttctaatcaggtagcaaggtttgtctagcttctacaaaattctttatctactagttccaaaaatttagaaaatatgtgattattgtaaaatatatgtacatattaaattaatgtagcaaaatatgatgtatgtatagaatacataataatcacttctttaaacttttctcatttgtttaaaatgtatcacaacttgttacaaacttttgtgatatttgtgctagagagctctaattatccctgccatcctaaatgtgttttggggagttaataatctaacacatcagcttcctccgaactcctttggctgtctccagtgatcacaaacatcacagtatcttcctaagaggacaagtactttagcgtctgtaaagcaagggagaaatgctgtttgcctttctgtaaattactcattttaatttttgtgataccctccattgacatccatgctgacatactttctttctatgactgaattatagcccacatatatgtttatatgtattttttttctttataggttctcacattgatgggcaccttagtttgatctatatgatggctcctataaactttgctatgatagatatgtggaagtgtatacttatttgatgaaattatttcaattttagtctggaataggatggatagattacacagtagttctgtttttactttcttgaggaatctccgtagtaatttctaagtaacaacttgtaatcttcctaacagtttatgcattattcattctatgaatcctccccaaactctgtagttttctattttgttaatgatcattttcatattggttaggcgatatgtcattgtgtttttgagttgtaccttcctgctaattgattatatttagtatttttttctatatgtattggtcattatgtgcctccttttgagaaacaactatttagaatttcagcctacttataatcatattattctcgttttatagtcttcttaaatctttttgaccgctgagttaattaagcaattgtgtatatgaattcttggccagtagttttgtaaatatcttggcacaatcagttcttaaatctatgagtgggttccctgatacaaggaattggtgtgatgtgattgactctgactattgtacatgcttgtaaattctcatctgaaacatgtctgcctatactaatcagtttcttgaggtttcctgataatttcttattgtattcattttatagttttcatatttcatagagattaaatttatctttatgtatttattcaatttagttttgatattgaaattatgatatgattacatttctactgttcctttctctccacagaacatcccatataacactccctactctcttttaaattttggcttcttttttcactgctatttcatacacacacacacacacacacacacacaaacttatgcatatatttctaacttttcaatccatataatgcaacttttatgcttgttaataaagtaagaagaattgatattctttcttttgcacatgtgtatctagttttccaacatcatttaataaaacgtctgtcttttctgcaatgtatgttttttggcacatttgccaaatcaccagctgatgaacacaggcacctatttaaactctacctcctgttctgctggtctaggtgctgagatttagtcagaactacttttccttccttttcttttcttttcttttcttttcttttctttttttcttttctttccttctttctttctttctttcttttcaactttggggtatgttttaaagtaggatgttttgatttttttcaactcggttatatgtcttggtcttttgtgagtacacgtgagttttagatttttaaaatattttctgtgaagactgtcatttatgttttaaatagggactgtaatgaatatggaggtagttttgtaactttttggttttatgggttggtcattggattggttggttttgtttttaaatcacttattgtaagggataatttaggttctcagtaaaattgagcacaattaacaggatatctctatataacacctcctccagtatatccaactctccccacaacagagattatatttgttataacaccatttatgcacatagctcatcttaggattatctcagtttgcacattctgcagtgtttggcaaataggcaagaaaacccacagccactggtgagtgctcatattttagataccccatagttttgccttttcagagtatcatcaggcttgagtgacataagtatgcagtttttccatgctgcactgtcccactccacaacactacttgggcaagctcctttacagcttctgcctgattcattaattcatttcctcttcctgcaaaacaactttttcatgtttgtgtgcaccacatgtctcatttagtataccttctttcctcttaaattttgtcaaatacaaacaaagctgttatcaacatcatgtgtaaggtttggggtatacatatgattaccaggagcttgtttttattggattttgttttattttatcagtttgcttgttggagttgagaaagggtcatccatcgtattttctacctcactaggcaaccgaaaatgaccttaaacttcgggtctcttgcctctgctttatgtatctgagattactggcacacactaccacacctaggttattaggtgctgatctatattcatattcatgaacaaacagtgtactttgattttagtaaataccaaagggcatgatcccttctgtgtggtgggagtatatttagttttacaagaataagagaagagtagcatgaagtcattgtgattgtatttttaattccctaatgacaaataaaccatcattctatggattattattttttttaccatatgcccatcatccaagtttaggtatctgttctcattgtgtaagtagaagttttcacttccttatggctgaattttaaaaattgttgtgtgcttttctgaaatagcacttcaacaactgtgttgtatgtacatatttcccaccaatctagactagccctctttctgctttccattttaatgaagtttgacctactaataatttcatttatgggttatatgtgttactaacacttcatcacatccaaagccactaagatttcctcttttgttttcttctaggatttttgtatttttttttttttttttttacttgaaggtctctggtctcttttgactgcatttcagtgaagagtctacaaactctatagatgtttcattgtattttgagacaaagctttactgtgtaacctgaatggtcttaaacttagagcaatcctcctgtcttggcctcccaagagctaggattacaggtaggcacacaaagatacacattacatttgcttcatgcatggctatccaactgtctcagcatgaaatattggaaaaagcagctttcttgataatatttctattgttcctttggcaaggaccaagaaactatttgaaaaaaaaataattagtggcttattttttccacatcaatttttgccatcagaacagaaactgacaatttttccaactctcctacagtagtgtattaattaacctgcactctatctcctacacagaatccagaacttatttattttttaaataccaaatttattgtatgattgtctgtttctgaaatataaatttttgatgtaccttaaaggggctgcataatctttctttatactaccacatgtcctcctttttgcctcctttctctgaagacaaattcactcatgcccatttcttcacaggctccagctggcatcgagattttctttcatcatcttcaacacacctcacttctttcctgcattcagtcttggaatacagaatttgttacaattcctggagaggcttagcccactccactgtctctgttagattactcattcctttgttcacttgaagtattatgtccatttaaacattgacttaatagtctacactgatttgcagttttgaactatcaatggtaaataatgaggattctctttccccatacccgttccagcatttgtttttagttctttgttgacttttgtcattttaactatggtaaatgaactctgaaagatcttttgatttttgaattccctaattgctgaagacaattaacatttttgagatatattttagctactttttttccttcttttgtgaattaactgttcagaaagatgttattagttttcctgaatatgcttagcttcactcaggtgttccccagaataggagaaacaacaggccttttgtcttcacagtatcatatagtgaccacacctgagtgtcctgcttgtgttatagataatgaatatctgaaatctcagttgaggtgggaaaataactgcaaaacaataagtttggggatttattttataattaatgaagtttgtacctccaactatttaccatggactcaaatcatctaattaccatccaaaagatttacaccagcatttagatctagtctagagagcagagattctgagagtcatagaatctcatattttgaaagaaaggtaaatgttatgaaattcctaatcatattaattaaatgcagataattaaaggattcatcctttgccttccttttccgtgcttcagggatccataatgcagggattatttgtatcctagggctgacatacccaggaagataagacagccatggagcttggcctttccttccttctggggactctacagagaaacccggtggctttcatcttttgcatttaagggatactctgctctcctgttcagaaagcagatttcaaatgctctgatgtttacttcccagacttaaagggaccattgcagtcatttcctcttggaggaatcctgtggtggactagtgcctgctgggtgatgaacacagatgctttgcacaaaaaatgacctgacataagtgggacatgtgtctatatgcctcatggttatgagcaataaaaaagaatttttccacacctttaatcgcagcacttgggaggcagagcaggtggatttctgagtttgaggccagccttttctacagagtgagttccagaacagccagggttatacagagaaaccctgtcttgaaaaaaaaagtttttttcattctcataaaataccaaaaaatcattcaaactgggaaactaatgaagaccaaagttggacactttgccccttcttagaattgggaacaaaacacccatggaaggagttacagagtcaaagtttggagctgaggcaaaaggatagaccatctagagactgccatacccggggatccatcccataatcagcctccaaacactgacaccattgcatacactagcaagattttgctgaaaggaccctgatatagctgtttcttgtgaggctatgctgtagtctagcaaacacagaagtggatgctcacagtcagcgattggatggaacacagggtcctcaatgaaggagctagagaaagtacccaaggagctaaagggatctgcaaccctataggtggaacaacaatatgaactaaccagtacccccacccccagagctcgtgtttctagctgcatatgtatcagaagatggcctagtcggccatcattggaaagagaggcccattggtcttgcaaactttttatgcctcagtacaggggaacaccagggccaagaagtgggagtgggtgggtaggggagtgggggggagggtatgggggacttttgagatagcattggaaatgtaaatgaagaatatacctaataaataaaaatataagtgtataatgtaactattattcagttctactctcttaaaaactacatattaaaatgaaaagcattatgactggctgagcttcttgctaactaacactgacagttcctatagtgggctctccttgagatcatccagagttacattcaggtgcttgaatatagtcttggttttcctcctcattgtataaaggtggccagagtagctgtgaacgtctatgacccataaactcgggtgagttcatgttcagaacccaaagcttctgtggatcgttagtctctcatcaagtggagatgcacacactgtataggtagttctctcacaaaccttctctgtgttactttatttatttaagggagattgaaatgtttttcgtatcagacgcctcttgtgatattaaaacggtttttacctcactgtttctctagtctcttttccaatattttaactaactcctgtgttcagaacctttaaaatttggcaagcaatagaatcatctttgtgctgtgagcttgcctggcctagaatgagttaagcgagacagagttagagacacaggtatagctttaaagactgatggtttctggacattttccctctccaactatactggatgcttgttgataacttctaaaatctgcttgcttaggtaattaatacctgtaacctaatagttgagattaagtaatctggccagtttttctatctccacaggaactggatggctctaacgcccagcctgccagtttaagttgcaagaagaaagagggacactttggaatgtgatcttaatctttgtttctaagttctctctaaaaagtgtactatgaaagtgctctaagcaaaggggattggggctttcctctctttgtcctcagcacttatacatctttcagaatacatgatcatatggtaaaatgttcagcacaagtttgcatataaattggaatcataaatcaaataagtttgcaacagagcatgtttacatgcatatccattaagagtaactacctggctaaacattcattatctatcacaagcttaacaggttcatagaaagttaaaaaccataacctttgtgactaagcattagtgaagttttgagtagaaaaacgcaattggtattctgttctatcacctatattaaatcatcagttccctttttatgaactttggttaacggttttacaacctcttggaatgtgctcaaagttgtagatgcctgcttgctatcgcagaagaaattaagtcctgacacttgaagtttggcggcattctcaatgcaattttgaaatgcgaaaggacttaatagcagccctatattataaaagagcttaataattactaatataatttgatgaattttataggatcatcattaagaattaagaaaacatctgtttgtctatatagcatcattacaagttagttcttcatgattctgcagagatctggtcaaaagggtgggccaatacctagtggttgttatatatatttaatgaaaataggcaaagcatattaatagcaggaacatttctttaaactgtaattcttctcagccttgcctaaagaaacaattccaactttaaaattaacagtccatggtagaatcatctcaggaatatcacctactaatttttagcttctccttgatggctcctggcagctttgtgaggccttgtcctatcttaagaggtatttttctcatactttcacaagcaactacaatgtttaccaaagcttaatgtatgaatggtttggtttacagaaaatactatgaaactttgttactctgagttatttctaacttatgttttatacagcatagttattaggtatgtgtatctattttaatttattgtggtgtgctctttttgttgtgaggaactattaatttttattcttttttattaaatggcattgcaatagcaaaagggtaaatggtctatttatcagctcatgatgagcacttcttggtttgagctagagcccttcactgcctgtggaatgatagtattaatacgtccaactgggaaatgctttgtgtggaagattgtgcatttgaggtatttatttaccataaaactcaaagattatgctacacattagtcacttgaaactagttaggattctgcatgtgtaaatactaatactgaagaacttactgaagaccttacttgatgagtatatattgtcagctttatggtctgaatgacaatttggctgacagccaaaggaaagtgttcctttgcatttattgtattttaactgtgagttttatatcaagattatttatttaccaactatactgcttgtgctaacaacattttaatctttgaaatgctacaaatccaaaactaacaacaaaaaaaaagacatgaagatatatgcacaaaaacttgtaacaactaaaataactatccataataaaaaaaaataaaaaaataaataaaaataaaagaacatacaaatgcccattgcaaaggaagatcaatgatttaaatctgatgaagcggtagccaattttccctgatgagaatctccagaggtggttgttaaatgtaccagtttgtaattacccaagtgctgtgggacctggaaaatcatcatggaataagagtcccagatgtttgtggtattcgggctggttaggtaaagtgtgacctggaatctgctcctggtgtatttcctgagctgctgcatgagtgtcaccagggagatactgagaactgcaaactgatcagtcccaactagacctactgcatctgggactgtggtctgggagggagtagatggcaagctgtgcttaacaaaccttccaggtaattatgatgagcatgctagtttagaaaccactggctcagagcatgctcagatgggactgctgggataaatggggtttcctgaattggcagattctcagagaagcttgagtacccagggaatccccaaactggaagaggaatgaaaagggcaacatcctaatgaactacacaactaaatttctatggtattttcttccatatacatttttcagcaaaacacatagcaaatattcattattgcctaagtaaaaaagaaaaaaaaattaaagtgtaagataattggagaaataagaaaccacagaattcatttaattctccaactgagagtgtcttgacacgaccatgagctctttgcacacttaaactgggcagagtttcatagtcaatgtctaacagtgcactgtattcaagtagataataattaaaaaaatgcctatttctttggagatttttcttgcctaaactagaaattcttagacatctgggtttctgacttatgcgaagatgaagagattgttgaagtacagaggtcagggattccaaaaaccactcttgtcaggatgtctgttttttgagtactaagcagagagtaagcaaagaacttcatgaggctcaaagtgccccatgactgtgtatttggaatcttcttttgaaaactgggttatttgactattacattttagcattcgttataattttctttttaaaataatcataaaatgttatttttcttaaaatttagcaatctgaaaactttcttttattttccacttctaggtattaagtatataggaagagatagggtgtcaacttgactttcttgctggtgtcgataggtaattgtcctttgcctgtcaacacacaaagacatctttccctaccatcttttcatggaaacatacacaggtcctatcttaaggtccactaaagtctgttgtatctcagaactccgcacgatgtgccaagtttatctgttatcacctcaatgccagcctgaaccagagcactaagtaaatttgtgcttttgaaataatatctagagttgtagacatagctgatagggttaaggggaaaaaatgaggacattgtgacattaagctcaggtctacactcttgcacaagcataaatcctatacccacacaacatatgtgcacaaaccaacaatatgttcatccccaaaccacaggcataataatattttcttgcctcattcttttgtcagatcctttttatttccataaaattaaattgactctgatttttccccaacacgtatgttgataattgattgaaattatagtagttataaatgtaggagaagaatttgtgtctttatggctctgggatttcaagtctataagtatgtatatattcattttcacaattttaaaaccttgaagtattattaattagcagtagaggtcttagcatatctttctggggattttttaaataatatatcatataattttctaagaatttaaatcgccttttaaattttttctttcatcttttatgtagatagatgatagatatatgattcaatagacagagggctgaacgaataactatcaatttcatttttaaaaatctattaattcagtttgactttgtattaatatttggaaattaataaagttaataaaatccatggatacattgttaaaatttactgttgtgctagttttcttcagaaatcttttaaaatatattattttgagccacgtctggtggcacatacctttaaacctaccattcaggaggcagatgaattactttcaggcaagcctggtctataatgtgacattccagggacccagagtactttgtgagacctggatccgggtgtgtgtgtgtgtgtgtgtgtgtgtgtgtgtgtgtgtgtgtctatttacttaggtaaacttaaaacgtttatttctctatgtatgttttcaagtcccctgtatccattccttcctctcccctttattacctccctccccagtttatcaccttgtcctttttcccttcctagtgcctgtgttctattatcccctcctgattccctcctgccccatgcttcctttcctctttcctgacttctttagttaaggtaatgcgatcaaatttaactattcttgtctaagatccacaagtgaaagagaacatgctgtgttgtctttctgggtcgggtttaatttactcaacataatatttttcagttccatccatttacctgatactttcacccttttgtttttcttaaaagctgaatagaattttattgtataaatgttgtgcagtcttattatctagttatcaattgagggacaactaggttgcttctatccccttgctcttatgaatagagcaacaatgtacatggataaacaagtacctgtggaataggttgtcgagtattttaaacatattccaaagagagatacatgtgagtcatatggcagatttagttttagctttcagagacttctccattacgatttctttactgataataccagtttgccatcccaacaacagcaaatgaattgctctctgtccctatatccatggcagcaattgttgccagttgtttatcttagtgattccccactggtaagtggaaatcttgagttgttttgcttttcatttccctgattgatgaggatcttaaatatttatgatattggttagctgattttgttttttattttgacatctctgttctgttctctagtctatattcttaagtgacttgtttttgactctttgatttttgttatactggaaattagttttctgtcagatatatagctggcaaagattttctcccactctgtgggtttcttcttcactagagtaatcatttccatttactgtacaagaggtttttagttttatgagctgaataaatggaggaaggaatgtaggagtcaaaggaccaagatacctgttggggtaaaatatcttttagaaatgtcagggattttgtacccatatgaacttaacagtatatggtgactcaaacaagacctggataatgtcaaccagagtagacctgtcagaatcaatgggagaaatttcacaaagtcctatcattaggtaggtaaagggctatagcgaatccaagggtgctgaatgaaagagcaaaagagcatccatcatttttgtctctagggataacaattgcgatgattggttataaaataccaagttgtcaatccttaacacatgaacaaaaatagtactaaatgaaagtgtaacatgtatgtgtatatgcaaattatatataaatatatgcatatataattcacagaagtagtcatgaactgagcctgaggagaggcagaggaagagtaggaaagagaatagcaaagggtgcaagtgtcataaataaaatacacatctataaattctaaaaaccaaatgttttttaaaagacaacaacaaagatattaccatatttcattttaacaccttgaatgtgtaaaccttgttgggtagctaagtaaaatcactttcttgttactaattgaatagacaaggacaattctaagcaataaataacagtgtgagattttattttgaaagaaaataactttagaatgatcaaaagacatttttcacatgaagacagttgggtgaaagcaggaatccagttaatgaattttcagagctcagcacaaaggtccttcctgaagaaagaagttttcacaaaaggagatgcacttcagaggaaaagcttctcaaaggaccctgtttagttcaccagactccttcaaacacaatgtattttaagaatctagagaggaatgattctttccacatcagggaaaacaatgctagttttattgtcctggcttcagcaacaagggctgatttgcagtgtcttctttgaacttctagccttttgagaggagacagggcatgcggtatttagaagtcaggagatgggacttagcttcaatttcttgttggtccctacctatcatgtctcatgattttatgttggtccacttcgaagactgattctgatgaattctcagatattttgagtttgttgctaagatctcagcttctatccaagcttcttattggatgttgttatgcttttgtgtccatacacatactcaattccaagtaaattagtccccttatcagcaatttcctccctgtgattgcaatcactaggagttaacctataattgaacagacatcacttacacttaagtatagtcctctacagaaaagagcaaccataaaagctcagcgttcgggaggagctcagtcacaaaaccctctagtgcctaagtcacatggagcctcatagaaaagaggcaaaaagcctgtaagactcacaggatcaggatatttctgtaagactgtgtctcttaggaaggtcagaagatacaccctgtaacatctcaccaaaatgactgcccataaatcacctgaacaagggtggcagtagtagatatgcaaaagtgaacagggggaaggccagaagacctcagctttacacaaagagaactgcaggcagctaagaaatgccaagatggtagaaatagccatccccaaagaaacacataccagtggtcacctgataccaaactgtcatccctgaaaacatacatatgagtaacattatataaattggcccacttatatttatgcatgttttatatgtgtgtgcatatgtgtgtatgtgtgtgtgaatgtgtgtgtgtgtgtgtgtgtgtgtgtgtgtgtaatgcaacagttaaagggaaaatagaccatgaatttaaaagaaggcaaggagggttatatgagagactttgaagggaagaaagagatgggtaaaatgatgggattataatttcaaaaataactaaatttttaacaatacattgagaaaaacttcactcatgtaactttattacagtgtatggcttgaattcctctacttttttttactgtcagtcattgtaaacctcttctgtgggttatttatattaaattttaccatgggtatgtatgcaaaggcaaaattattgtatgcagcttattactactgagcatttcatttgtccataaggatcattgaacacctgccgtgtttatatccagaacaaccatagtcagtcccctagattccagccttccttcctgaacatccttcacataaggtctcttctacagtttatgcctgctaacctctccctattgggaattaagtcagtagttctcttgtgctcagctacttaaggttctctgtttcctctttaagttgccaagggagaacaatgatcatgtacaatgttttgtttattctcatgctttgtttaataagatgtaaattcaagaaaagtttaggggaatttagtctccattatgctattcatatgaacactttgattttaatacctgacattctattagaagaatgaatgggttgacagatttgttagggaatttaaatctctagtgtttcatgagatcccataacctgttgaaaggcctgcatgtctctggacagatggtgccctgttaaattcaaggaagctacaaacaagaggcatactgattccctgtgtgtcagatgtttctagcaatatgttacctgtcatcatgaagcacagacctacacctccagcatttttagacagcagagttttatagtctaacatttaactgaagaaaataatgcaagaaactcaatttatataagctctcagtctgaatgagttagctattttttcttaacatcctcaacacaactggcatttttttttatattcttatagtaaaataaacatgtttaggcagagccaaaaaatgatttattttcctccacttttacaattacaacacaaatacccaagatacataaaattcctattacttccatcaatatccacaggtacaaataagaaaggttagtgacaataaggtgaggaatggcttgacaagggcttcctgacaacactctttctgactccttataacttggcattggatggattttattatacttggtatgaaaatactgtagcatttacagtgtccagtaaatgccttgtcaatgacccaggcatggcctaagtggactggaactcgggaagtcttctgttcatagcaatcaactatgctgtccacactcttgggctagatactgatcttcagcaggtggatgttcatcatgtctagcttctttttataggcagttcctctactcttctttctgtatggcaatcctggtcaggcacatccacatcggattgttattcacacacaggccatgatgcagctgtatccagtattcactaccaggaaatacttatttgcatcagctgcttctggaacttatgtgacaggtagctgagtaccacaagcaacagttaaactcttgagtaaaatgcaacttcttctcaacttccaccttcttattggcttgcgcagaagactctgtcacaatatgccattagcactatggaaggagacttcattagattatggaaagcaaagatttacacaaatttcttgtcatgtagggagaagaagtccaagaggcattgcttgatttgacccaaaagactgaaaatgaatggagtaaagttggagtttctgtaatttttatctatagagatacccttctgagttgaaaggggaaactttaattgctaatgaattcctgtgtgtgtgtgtgtgtgtgtgtgtgtgttcttgagtcttttataaaagttctcgtaacatgaaagagctaaacaggtttaggaaaagataaaggaaaggaagaggcatcaaggggaagttgtctttagagtcaatgtccactgttataagattattgttacgattaaatatttgaaatagatgaaatagaaataattgttcttatatactcatattaattaccctgtgcagtagtttttaaaaatgtaaacatatttctagaattatcaaaaccagaagcaagcttcagcactgctgcttggaattctcatgcaatggttaacgttggatggaggataggtcattgttctaacgatttagtttcagtgagctcttgaaattttcagaaaataaaaactctaactttatctgtaaagaaagaaaccagaaacatgatcataataaaatagattcctgttattttgtggtatgctgtcttttgtattttattcttaatatacatggaacatagaacaccacagacaagaaggtcacaaaaaaaaggaagatttatgagttgctgaaccagcactaattgagtaaaaatagaattttaacccagacaagtaccctactgaggcacttagtgaaaattatcaaagacaacagccatgatttcagcaatttaaataactacctgatcttatcatgttgcaagtatgtctataaactccagctgtcacctaaagatcaacattgagaggctattttaaatgacccattgcctcatgttagggtggacactgccaagcgtaaagcataatctgtctttttttcctaagaagtgacatggtattgtttgctccttgctactccattaatatcattattctagttaatgccaatgataaattcagtaatagaattagtggcaagttagaattaggataagactggaaatcattccaattttttaaatgcaaggaccaatgcatacctgcttaaattagatgaaatttaatagattccagttagtctgccccgtggagaaaggatgaagtgctaagtagtgttgtgatattgacatgaatacagtcatgccaaggaccccaatacctcagacccaagggattggcaatatcttccccaggactgtgtaagaggaatgacacatttctccctctgatacaagtatgtatagatgttaataatgattgatctttccctaaaaccagcatatgcagaaaccacagcaccctcctcattcacctggatctattaaaattgagtcctcattctgcagcatagagtaaatacacagtgttgtggctgcttgtgtatctccatcagagctgtactggctagttttgtgtcaacttgacacagactggagttatcacagaggaaggagcttcagttggggaaatgcctccatgagatccacctgcaaggcattttctcaattagtgatcaagcagggaggtccccttgtgggtggtgccatctctgggctggtagtcttggttctataagagagcaggctgagcaagccaggagaggcaagccaataaaaaaaaaccctccatggcctctgtatcagctcctgcttcctgacctgcttgagttccagtcctgacttccttcagtgatgaacagcaatgtagaaatgcaagcagaataaaccctttcatccccaacttgctttttggtcatgatgcttgtgcaggaatagaaaccctgactaagacaagagcacaaggattatcccaccagaggttttctgggtgagcatctgttgttcttcatttgcccattgtatctcccatgtcaaccctagagccttgtaggtctcaatggtggctaagagaacttaaaagatccttgatggtagccacagtcctttgtttccttgaatcattaaaggctatcaatgttttaagagagataaattgtaaccaaacatttattgagttgtctgaaatttcctgggttatcccttgtaataaatgctatacgcttttgcagtttttagtaaattaataaaatttgttgtagtgttcccagtgagaaaagatattcatgggttctttcaaaaataagcatgaagcaaaattgttatgagagtatgagattctcagttagcattgccatttggctgcctacaccattaaatataaccctggcaccaattgtttaaatataagtctttaaacaagattcattccaatattttattttattatttatttattttatttatttatatcccaaatgttgccagtgccccctcacagagttcttttccctcctcccctttgcctctaagtgggtatccccctgcccatatgtccctgccctaggacatcaaatttcatcacggctttaggtgtatcttctctcaggaggccagacaagtcagtcctctgctctatatgtgcctggagtctcagaccaccctggatatactatttggttggtggctcagtccctaggagctcccaggggtccagattggtcaacactgtttgtctttccatagatttgtcatccccttcagttttgtcagtctttctcccaactcttctgtagggaaccctgagctctgtctaatgcttggctgtgagtatctgtatctatctcagtcagctgctgggtagagccgctcagagaacagccacactgggcttctctcagcaagcacaatgctcattattagtaatgtcaggaattggtacctactgatgggatggatcccagtttgggctggttactgctcagccattccttcaggctctgattttgtccctgtatttcttttagacaggagcagtttttggttgaaagttttgtaggtgggttggtgtctccatttatcctttcactgggggtcctgtctaattgacagaggtggcctcttcaggtttcatatccccactgttgggcattttggctatgatcacccacaccaagtcctgatagcctaccctgtcccaggtctttgggactctgtaaagtttcttcctattccccctcccccatccctggcagcatttgaggacaataatgttctatttctctcatgggaaatattagatttcccacaaaatggcattccctgtaaggtttggacagcatcatagctttgcaatttgtgctggctctgccaaggcaccctttctagaacttccaggtgtacaggacaataagattctgtttaaaaatgcacagacagctgtccttcatggttggaaatgatgccagtggggagattagaaacagatataaacatgtttgaaaaaaactcttttgtgactacattctcaatttcaaacagatgccgcatactttcatatggatcaatgaatgctcataaatagaaaaatatacaccacattaacagatcacattgtattgagaagtacattttgcttctcagagacttccagcatagtagcttagaattaaagtaccagtttttgactgatacatcaacagtcactgcataacagaatctcttagaaagtatggggcttacaacaattatatcattcgtgattctggtagacatcaggatagttctggtctaggacagctggacccatttacttcatgttcttatgaccaactggtttattagcaggagtgatttgctttgatagcctggacatatggggcttttctccaggcactgtccccgccagcatgctagtgtagctccagagcgatgtcaggggtgcaagcgtgaaagtagaacttgaacttggtctgtcttttgagccctaggctggaacagattctgaattaccataggaacagccaggatgccaatgataaagaaatggacttcaggaagagaaatcaattgtaaggtgttttataatttgccccagaaatgctggaaacttacagttcctttcttgataagtggtggtattgtttaaataataaccagaaccaagataaccaagggagccaacatgcttgggaagctatgtgcttagaaccactgctgctacatgtggagtgttcacagtagctgtaagagatgggtatcaaatttcctctctttatagggaagacttttaaacagaaggctgtatctgtatgatcagataataaaaatccctaaaagcattccctgatcgaaagcagaaaactcagaataatcaatggttaagaatctatctacctgtccttcctcctatcttcccagtgaagtgctcaggcttcttttaatagtcatgtgagggtttttttgctttttgtttgtttgtttgtttttcttttctaatcattccattcgtttacatctcaaataatatctgatttcctggttacccctccacaatttccccatcacacaacctccttctcctccctcccctttggctctttgagggtgctcccaaactcacccaccctctccttccccactccttcagaatcgccctatgcatcagctctacctatatctctggatccgtggatcccttcctgtaccctccttggttggtggtctagtcgctgggagcactgggtggtctagccagctgatattaatgtgaaatttgaatcttaatatagggagagcttcctgctacattttccaaattggtaacctaggaatgtttctttctgtggtgtatccattaatgttttaacatgttaatcaatggttttctgtgtaacctagcttggaaaataatgacacatttaagagagtatttaaattgaaagccaatagctgactgtgagcatccacttctgtgtttgctaggccccggcatagtctcacaagagatagctacatctgggtcctttcaataaaatcttgctagggtatgcaatggtgtcagcgtttggatgctgattatggggtggatccctggatatggcagtctctacatggtccatcttgactctagctgcatatgtaacaaaagatggcctaatcggccatcactggaaagagaggcccattggacacgtaaactttgtatgccccagtacagggaaacgccagggccaaaaagggggagtgggtgggtaggggagtgggggtgggtgggtatgggggacttttggtatagcattggaaatgtaaatgaggtaaatacctaataaaaaatggaaaaaaaaattgaaagccaagtcaccttcacccttgttatatgccaatatactttcccctgataatataaagaggtatagaaaataaatttcttatacgtatttacttttggatatcaaaacaaaactatccagtagatatataaactttcaggcaattatattcatgattcatctccatagttcttcatttctttgtatttcagtgatattcttttttaaatttattaatttatttattggtttttcgagacagggcttctctgtgtagccctggctgtcctggaactcactctgtagaccaggctggcctagaactcagaaatctgtctgcctctgcctcccaagtgctgggattaaaggcttgcaccatggctgcccggctattcatttatttttatgtacctttgttgtttggcctacatgtatgtctctatgagggagtagagtccactggacctgagttacagacagtttgagcagcctcatgggtgctgggaattgaacccagtactcttaaccaatgactcatctctccagtctccagtattgtttttttaaattgtgtcccagcaatttcttttatagaatatctccccctcctcttctttctctttattcttcttgtattactgtctctctgagaagtagcttagtattaactgtgctgacttttaaagaatatcaatagggcataagattttaaggaaagttaaaccatatctacctgcttctgaatcacacatctctagacctgcacatcagcaggaccaactctgagtcttacaagtaagacagtaacagaaagtaacagatttttttcccctagggagggacattcagcaagcaacttttgactatataaatatccaggaagattacataagacctttaaatgccaaatttcatataaaataatagtgtttgtacttttctccatatttatttgtgcatgcacacatacacacacatgttagtgtgtgtgtatgtatatgtgtatatgtgtgtgtgtgtagctttttaataactaagtagatgtcagagttatatttaatccttaaaaataatactatgcaacagatatacttattctcatttttataactggaaactgggaaactgaaagatgtaaaatgaattagttctagttacctatagaataaagcaaagaggaaaatttaaacctaaatgttaattaacttagaagacaaaggcttccagtacaaaaaaaaatgtgcatgagaagtgcactgtgttccaaaagtataacactcaacagaaaagtgtgcctgtctgtaatggaggggccaggaccttcagctgttggacatttaatagttgatttaggtgtcccttcttattaatcacttttaatcacatactacactctggtcaaagggagtgaacttttgtgataggggtgacagataggtggaggaagctgtgtccttaaaaaaggatagtagagttttccttcttgaaccagttctcacacacctcttgagagattaaataaatacataaataaataaacaaataaataaataagccttatgtatagaatgagaactctcaaaaagaccccaaagctaagaaatctactgggatatagctccagctgagctgaaattcagggaaaaaattaccttaaaccttgtatttcgtagtaaagcattgatctccctgtacttcaccctaaagggaagattgagtgggaaattcaaaggacttctaataattcagagcttctaataattcagtagtagtggcggttagcctcagtcaaagccagcccaaggcttgtaaacagcccagggtgctagctgggattcctatgcataaatgagaaatggcttgaaggaacatagagatatacctggtacatagagtgggtagagaccaatattatatatggaactatatttgtgctcatctgctggttagctcaactgattaatcactgctacacttctccatatatattcataatttataatggagtattctttaaatctaagcaaagtacaggtggcatctagttaccgatctacatgaaagcacagggcactcagattcatactctaagaaaataaaggactggaatggactccaaccaaatctatgtagctgactgaggtgaaggtgccctcagttaaggggtttagaagttgctgggccacagaccgtgagagttcttgtctctccattttgctggtattgaccatacatttaaatcagcacaaaaattattaatctcattgaacatcacatatttttcaaacaagtcttctatatagtgaaggaagtatttcaaagtctaaattataaatcagtagaaacagtgagttcttcaataactttttgccattttgattttggagtataagtggttctaaaatataccactactgtagagcacgattccaggcaacacaatttgtatataggtctatgtgttcgtcacatgtggacctttattgcaactgacaacctcatttgacaatgagagggtgatgtcacatcaagcactatcataatgtaacaagtgttctaaagacattgtatttgtgtatgaaattaccaaattatagataatagatagattatatatatgtatatatatatatatatcatgcatgtatatatcaactgttatctcactatgtagtgaatcaatcaagcatctgtgctcattattttacccagtacatatgtcttcagaagttagtaatttatcttttaatataagggacaccaaagctagaaaattgtatactgacactatatttataagtgacagctgactattatttaaagccagacttgccatgcccaaagcctgtttctttgttggactaagctacctttcattaacaagatgtttctatgtcaattttttttcatgtaattattggggcctcacatctggcctttaggatctgaggtttacagggaaatgtgctaagaaaaataaaaatcataataaaataataaaatatcatgatttcccttagactatctaagtagcctgtaagtgcattagtcagatccctaaaacctataaagatagtaaaatgtgatgcatgttcccattttccatatttctttttgtgataaatatattagattttctttcaattagggtgaaatttgttaaagtatgcctcttctagtaaaagaaacgctgacaccattgcatacagtagcaagattttgctgaaaggacccagatatagctgtctcttgtgagactatgccggggcctagcaaacacagaagtggatgatcacagtcagctattggatgggtcacacggcccccaatggaggagctagagaaattacccaaggagctaaagggaactgcaaccctataggtggaacaacattatgaactaaccaataccccggagctcttgactctagctgcatatgtatcaaaagatggcctagttggccatcactgcaaagagaggcccattggatttgcaaactgtatatgccccagtacaggggaaccccagggccaaaaagggggagtgggtgggtaggggattgggggggtgggtatggcggacttttgggatagcattgaaaatgtaaacgaggaaaataactaattaaaaaaaaagaatatatacttttaagcaaaaccataacctccctgaacttgtttcaccatctctgctttgaagatggcaaacactgtctttctcacaggatccagcacgatacacatggaaatgaagacatgccttgccatgtgctcaatatagcttcgctattaaatgggtaattcttacttttgtcaatctatacctttcaactcacacccaggttatttcgggacaaataaagttcttatataaccaagtaaaagatgtgttatcttaacagctggcaccagaatccatcctaggcagggaatgtttttttgtcaaaataccttcttaaagcattgtgcaaggtgtaacagtgagggcacaggatgtcagcaggacacccaactataaaaagagatgtttaaattgttctggataagaaaattataggaatttatgttttgttccccaaaatggagactagagaaatatattaatggtgggaaggaggaagcctgaggagacagggtgaattgaggacatactagcagaatagatgaacacttttttttttaaagaatgtcagaaagacatcttagaaaatgaaatctgattttcaaagtgcttatattacttgtttgacagtcttccccaaatcaaatttcataaaagcctaccatacttataaacagtgaaaattaataacttttctatcatgtttgggttaacttaagcatatcaatacatgactggacacaaaaaagacatcaagaaaagccactatctcctttactgaagaatagacctcttgagggttccaagcaattttcagccttctcaagagttaggcagccccaactgatatgcgaattacattttactaaggggtctcctgacttcagtggaccaaaagagcatctacattacaaagtcatttttgaatatactttttggctctgaaatacatcccatagtagtcctttatattaattcccattggtttcaatgaacaacaagcttctctagaaaaaaaaaaaaaaaactacttcctgaaactttcttttaatagaccttataaagctcaattttcagattcacagtaaaactgaaataaaagtactaaaattttattgcctcccagtgcttcacaaaaacaaagttctccccatccacacccttaatatatcactgacaagtccctttcaacagaagggactacactgacacatgagtgtcatagaaattctgtagtttttatgagcagccattctggatgaatcttctaatcttccttttctatttttaaaatttcagttgatattttataattgtgtctattaatgggctattgtgtgatattctcatccatgtatcgatttaattgcaataaaatgcagatgctcatcacatacatcacttcttatatttcaagttgcttaagaatgaaaacattaaaaaccccctctcttaagtattttcaaatgctgataaggtgtgagagagagacagagagagagagagagagagagagagagagattgagattggtcaaggggtatacatatacaaagttctgtcatagttctgggttcatggaattaaatactccagatgcattcatagtgagaatgtttacctgaacagttattatggctgtggatagccaagtgtaaacaaatctctctctctctctctctctctctctctctctctctctcacacacacacacacacacacacagagagagagtgtcaaagtgaaagccacatacatgtgaatataaacacacatacttagttgtttggaaataatgatacattgttgaaagcacagatgttaatttagcaaacgattccggtcagaagatgctgtaggcttgaaaggaggaagaaatagtgttagaactctggcctccggatctgcttttcattaaatatcagccagaaataaatcaatttcatcatattcttctcttttgcctctggactgattttaacaaaatccataataatcttgtaacactcggtgtttttttttccaactgtacagcaggcaggtgtttatcctcctttaagggctgctttcacaccagagcccgcgtaagagtttaatgtgattttatgttttccagttacaaacaagggatcatccaattacacacctcctctctcggtcttccctggaaacatccgggaaatatttcattcactggtgatttgctccatgcttctgagatccatcccttttcatgtgttaattctgactgatgctatattaaatggctcaaggcgcctggctctgtggttgccatgaccactaatgctctgtgttgctcaaacctacagtttacttctgatgcctgctccttacaatcattccccagcaagctttcccatgtgtatgagacttcagaagctcaggtaccagatgagacttagacagaagtcccctcatgcatacgcactgacaaaggccagaaagctcagaatttaggcagcacctatctgcatttttatctaataggggttattctaggtagttttattctgagtattagtttcatattgaacttttttttttttccccatggaggagttgacaaatgtttcagtttgacatctgaaccattaggaaatgctacatagtgacaatccagtagacagcctatcattctgagggagggaataagtcaaacaagatttggctcggctttttttttttttcctcctattccctgtctcacacaaagctactaaagcatcaaatgaattgtaaaatttgtcacaaataacaaaatgaaaaccagcaaacaatttcataaacgtgaatttcatccgcaatgatcaagaaaattgaggcagtcagaaaagcatgcgctgatgtgctttgttttggaagaattaaggacacagaggagatcacagtgtataaaggagaaactacccaggcccacttatagatggcaggtagaggctcctgttatagacgcacattgcaggaatggtttggtgactatccaaccctaattaaattggattaatttgctgacaatagtcctaatcattgaagatttccatcacctgcctctgcttacggtcttctaactctctttgcttcttgttgtgaattaaagggggttggagtttcttggggactccatagccatctttaccttttctttttgctatgagtctctggtatggtgataatattttcaaatcgtttaaataactgcatgcccataaaaggcttatatgagcaattttgatttctggatgatgtagctcacatgtcagtcactaccagtgttaaatatatgtcctttgtttctatccaccaaatgcttcacaatgatatagagaaaggatgctctactagagttcttggagttattaatcaaaaaaaaaaaaaaagataagaatagatttaaacaaaagtgcaaggacaagtttgctagatttttttttttaaatagaaaaataccaagacaggtatatgtaaatttcagtaaggcagctatcaggcatgtaggaagagaacaaaggagacaggttaaatgccaaaggtgcttaacttaaggtggcttggagctcagcatgtgactgacaagtagctacatggaaaggagggaaacttctaaggaacagtaagtaatgaagcccaaaatgttggggaagcccaacataagtatagaaaacatgcacacacacacacacacgcacgcacacacagagacacactcatacacactcacacacacacagagtgggggaagtgaggaagggaaggaaaggggagaaacaatcctttcgccaactactatgaaaagtgccagactccccatcctgtgtgtgagctactatacctgggcagaatttctggggtagctaagttcagtttctcagcagagaacaatgattctggcttatctccatagcacggcttaaagtcggcctgccttcttagagctggtccgttggccttgtgacctacccagtcccagggcaatgtgaggtttccacccaggcagagaaccctgatctctagagcaggaatccttaactgtagttgtgcgtatgattctaagaggaaccttacttaataaggagaacttgatatttgaggataatttttgattcaaactttgacattttagtcaaaatattcattttaccacagttatatatttttagtttaatagcattgacatcataattttataagaaaaaaagtacctagaccactaacacagtaaaaagaatatattgtctagaaataaaattcattttaatgaactatatatgtatttactaagttaactatcatatttttgatttgtcttaagacaatatactgccaagagaaatatcacaatggaacctctaactattttttattttttgaacttgtatgtgtgtgtgtgtgtgtgtgtgtgtgtgtgtgtgtgtgtactcatgccactgcatatgcctgaatgttagatgactgtttgtggaatctgttctctccatcaacctggtggggtcttagaattgaactcaagttattagatttagtggcaagcacctttacacagtgagtcagctcatcaagcccaggctcccacttcttaaatcaagacaggatttgagaatgtagacggtaaggtcaaagcagggacaactaatatgcagacaaatgttcctatggccccagagtagatggtggagaatgaacaggaagccatttcattttatcatctgaaatggactggcagcaagaaacagagatagctgatcaactcaaatgatgtagaaatcacaggatttataatattctatcctttatttggaaaacaagaatatgtgtgtgtgtgtgtgtgtgtgtgtgtgtgtgtgtgtgtgtgtgtttgtgtgtgtgtgtttttgcacaagctgaacagttgtccctatcatctttcttaagtttttctgtgtactgtcttttcttcctacttcgtttgattgtattgtgtatgtgacaaaatattagactaggcattaatacaggtggtattcattcgtgtgtcagatctgctatataaataagctaaccaatactaaagggtgctgtgatgaagtgattgaagggtaagtgttcagccaatggccctgactcattcacaagaaaaaagaagtgggcacctgatttctattacataaattgttatttgaaaataaaagcactttactgaagagaaacattcaaatttattgggaaaaaaaaggctgtggaaaaaccaatattttcattcaggttacagctaaatttgttttcattcattgaactggatagctagtagaattttgtttttttttaacacaagaaaagaagtaaacaaattggaggaaaataacataatcacaatcttattaaacacaaaagacgatcaatgcagtgaattacaagtattccatgtttctgtgtagctttccattatcttcatttaagatcaggatggctaggttttctttctaacagatgctttcacccaaacctggctctcttctgtaatttgcatcaatcacacttccagttatctttatcttaccaacaaaagacatttaggagacttaggacaaactaaatacaggaaagacaaccaaagttccacatgtttctaaatgtgtcttgtggactattatttctgtttgctactcagagtttgtatcatggtttgcatcttcacactgcattaaaacagaattagcagttgagtataaaattaagttttgctgaattgtgaggaaaaaggatgggtcaagaatatttaattcaatattgagcctttgaatgttgaactgacaatttgtaggactgtaatgatggaagaattttaattcactcgagttactgattctgatatgattttgatggagtagtatttcttatcgactctgtgtaatctcttttagtggaaaattcctttccttctccagtgccccacccaaatataattcctaaaagagaagaaaaactacatttttgcagtaaagctagataggtaagatacttattatgttattcagaagaaaagacaattatctacaataatactagcaattcccttttgaaaatatttgtcctcaaggagcacactaggaatatatgcaaaaggcagacagccacatactgtactcacctaatgtctgagctcacctatggagctcagagaagggaaaacttagctgtaaaattactcaaattcagttatttcatcctaaatcattataataatgatgatttattttgatggtcaagatatgaggtgaagctgaaatctctttacttagaatccaagggtgtgtgtatccagaaaactcggcagcttaaatagtgcttaagcatttatatttaattgaattggagccagataatcatgggcattgcctgaacagtctcaggctgcgtgcttgctgctcctggtacccagaggcgaaactccattagaattcagcagatcttaccaactgctgaacactatggagctgcagagttggatattgtttcaggctgggaatttaagcctctgggaaaaggcaggccagaatcgtgctggtctttgcaatgtcaccaggaatcagcaggcagaaatccccatcttctgagattaaacaatatggaagaactcctttgaacttggtctttgtggagaactgaaacacagcttccagaagtgctgtgcagaggatgcgtgagtttaagatgtgtgtgctttaaaggaaatatgataatgtatttaattttctgcattaaagttgaagttaactgagccttacatataacaaatcacaaaatactaaagtcagcttgcttcatatctctatctatctatctatctatctatctatctatctatctatctatctatctatctatctatctacctacctacccatccatccatccatccatctatctatctatctatctatctatctatctatctatctatctatctatatatatatatatataaaacttctattgattcgtaaagaatttcatgcaacctgttttgatgttgttgatacagctctcccagctgttactagattcaccccactttccctaccagccaattttgtgtcaaagaacaggacaaaagaaatcctcgagaccagtttgtgctgcctaaatattcttggatggacctattctgaatcctttttaatcaccatctaatgcaaacagaagcttcacagacgagcattgagacccattgatctacgagaatcacgggaagtcattaggaatcagtttattattatgttcatttaacagagttagaaaatttgagctatactgagagaaaaataatttaattctggtgattactgtttttcagtagtgaagttgcctaaccctaaagaacatttaatgccatataagtgatgattttactagcttttgaagatgcgggggatggcagaagatagttttcagcagtaaaactccaggaaggtcattttacgaaaatgtattaggaaaggtcatttgttcatgaacagggagatataaaggcctccaagcaaaaggctgtgttgagaggaaaaattgatatagtatattatttataaatacttttgccttataactgtggtagagggaaaaggggaatgaagtatataagcaatgaaaacctgcttccagcatttctttctgtaagtatataaataggaagaaatgtatgtgaatacattaaaggggtttgtatatacaacactacagtggtgaggtcgtggatattatttgcattttgtagttgaggaaactttgcatgaagcgtttgggtaaaagctaacttcataagttaaacatttaattgacagcactcacattatagcagccatctgtagcacccattaaattagtttcttgattttctgtgttcagtgtaatctagaatccagttccagttggttgccaatccaacagtgtatcctggaagccctgttggagatctaatccccccagggaaaacgagaaagatttacatagacactatgttaaaatgagactcggaaattgccatagatgataaaaattgtattaattctattaattctatcaatactccgatagacacacacacacacacacacacacacacacacacacacacacacacacatatatatgacatacagtaacatttcaagaagatataaatgatggaacaattattgaagaaattcaggaagaagtagatggtttctgtttttaaaatatcagttgaggtttaaatgtattggggtaattgaaaggcaggtaagaaatatggtagaatggatggcatacaaggtcgtctttcctttatgccagctatgttctatttgcaccatctattttaacaagccaggaattatgggttattccataatgttaaataggataggttagggatttattgtagtgggcacagtaaaaatttgaagtcaggagtgtgttaattttttaaaggtattatatgatatttgattatgcgttccaacttgactaggtcatatagtgcccagaaatttgaataagaatttattttctgggtatagatgcatggatatttttggataatattaatatttcagtccatagtctgaagaatgcatatcactcttttttttgaatgttattacattttatttatttacttttttgtattgaggaggggtgtacttttggcgcagtacatgtgtggaggtcagaggataacttgcaagtgtccttttcctgccaggtgctgggattgaattcaggtcaccaggcttggtggggagtgcctttctttgctgagccactccagacctgttgtaatcactcttcttaatgtgtatggatcttatccaatatcctgaaggcctgtttagaataaaagtcttgaaggaggaaactctgctggtctgactgcctatctgcctgcctgcctgcctgctctgcctgtctgcctgtgtctgcctgtgtctgcctgtgtctgcctgtctgcctgtctgcctgtctgcctgtctgcctgtctgcctgtgtctgcctgtgtctgcctgtgtctgcctgtctgcctgtctgcctgtctgcctgtctgcctgtctgcctgtctgcctgtgtctacctgtgtctgcctgtatccgcctgtgtctgcctgtctgcctgtctgcctgtctgcctgtgtctacctgtgtctgcctgtatccgcctgtgtctgcctgtctgccggtctgcctgtctgactgattgcttgatgtcagtgttgctcctttgtagctgaaagaacagaacgtcaattgagcttgggtctcgaggaagcttatcttagactagagcatacaccttcagcctctccacacctcaagtctttcaaagacggaaaaggtctgcacattgactgagtcctggtctcccttgtccactgaataccacgtgattactgaatcctcactgttgtggaggcgcagatttatttaggtgattcctcttgactcagtttcctattggaccctgacgatgatactttctcctagaagtgcgccacaattggggcatcatgagattgtatcccagtgcaggaacccagcctgtccaacctctcacactcccagaaagacagactcatagtgaagaaacaaacactgagtgggtgctgattttttttcatagacagaagacttgggtgtagaatttcttaggcacagcagcactgtaaccagcaactctaagccaggaggaagtcgctctctctctgctgaggaggaaaagcccaagcagatgaacctaaccatatgccttctctcctctggggaaaaagacatcctctgatccagtcaacagtaagtttgcatcagtttcttcttaccacatgacaccaggttagacgtgatcttccctgggtaacattgtagaaagtgttgtctggaaagacactgtgtattatactagaaaggggaactgtagaaaataattattatgcctaaatatctgttcaaaaatacatgattttcccccattaattaattaattaattaaatcactttacatcctgattgtaaacttttctcatctcatccctccccccatacataatagcattggccttcccccatacaccccttctcttctcctctgagaaggggggggggcagtctgagacatcacgtcactgcaagattaggcatatcctctctcactgaggccagagaacagtttggggaacaggattcacatgcagacaacagagtgaaggatagcctctgctccaggttttacgggacctgcatgaaggccaagtcgtacttctacatatgtgcagggggcctaggtccaacccatgtattctctttggttggtagttcaatcttggggaggtcacaagggtctagtaacatcacactttaaaatcaatcccccaagtttgtagtctatacacaatttgtgtttaaaaaaaaaaaaaaaaaaagacttggccagctaaacatactttataagaattcaaagactgtgggataccaaagagattctcttagattcagcatgatgggaaaatgcaagcagtgaaatgaaaatgggattagattagagagagtaattgagtgtgtacgttccgttggagggaggaaaacgcaggcctggagattagtgaggatgtcgtacttgtaatccatcaagtgattagagctgtatcatgaggtggtgacagggttaataaaaatgaaaggatgcttcaagagatgggtcaatcccacacagtgactcattggaaatagatgatgaaggaaaaaaaaaagccaatgataacttcaaaattaaatgtggcaactggaaaaaaaatggtttcagttagggagatgaaattagaggtgtcccttgtggtccaaagatgataagtgactttgtggtaaaagatgactcccatttgtagccaaattcagggttaattgactgggactgactcacactttaataagacagagtagagtggaacataagataacacagaggcttgagttggctctcatcccacacgagggctgcagaatcatctctagtttgatggtgtgtggaagaaagttcagtaaggaggtggaatggttatttaggagtaagggtggccccctgaggaccacatgagaaggcagacatcttcatgcacatttgagaccagcactgttagaactttgatctttgacttgtgattgtccagactggaagataaaattgagtcatttggggtgtttaggccaaccactctgcggtatattgttaagatagcccagtttgatgaatacagtaatttccgtgcttacaaaataaattatctgtgactaagatgagttaataattatacttaaggaatataacaaggagacaaatatcagtaatgaaatatattaataattcagtatttaataactgtgttgtatttattttaaaacatgtaagatatgtactataaatatatttcagaaaacaattcataataccagggtaatttccttagaaatcttttttctgttacacagaattatgaaatgtctaatatttgtgtgcctctccaacaaagaacatgtgcattactgtgtagtgacattataggaggaaaaggacaaagcaaatcaaccaaatggttggagataacactgatggtagtgactggtagttactaagctcttgcgtgtgctgggtggtttccttttttattgttgtttcatttattttgttttagagacatgatctcatattacccatagagacactgaaaatgtatcaatcacaaagttgcatgcagaaagactaccagcccaaacaatcacacccaaattaattaaaggaagctttttatttgtatacattgctgcttccccttaagtgagatttaagaagtaaggacattggacatggacaagatgatgtgatttttgttttgttttgttggtggttttttttttttattgtttgttttaattttaggtatagggaatttccacatgggagatttggcagctatgtcaagctacagcagcagcagaacagggtagtcatatcaaggtagtcaatacaagatagtcatagtgaggtagtcataacaacattttgaaacaaagctagggttgtaagaaatttttaaaccagagacatggttgctgtttcccagaactagcagtaaaggagaactatttgtatttaaagttacaggtgaggtacagcttagtcctggagaaacagggttaaccagaaacagaagtgaaccagtttgtctataccgaaagatggctttcaacgccaagatgaaagcaggctggttcgtctatgctatatacctgaggatgatgttggattcatgatcctcctggttctaccttgtcctgagattatcagcaagcactgctttacctggttttatgtagttctaaggatagaacccagggccttttgcacggtagacatgcatggtaggctcaactccactccctcatgctgttttctatacacggcaatgtaagaatttaattaacctttatacaagcatcctaagtagttactattaattacgaagtgtgtgtgtgtgtctgtctgtctgtgtgtctgtgtgtgaagctgtccaaggcacagagagagtaagtagtctcatgctgaatgagacagcaggggtaatccatgtttctccagacaaggattctgggactttttttctaaagttctatgagccttgattaaaaaatttcactgaactactgggtcttaggtaaaatagaaatttgagacacccttttcatgattgtttcctctagaagaagggctagctagcctgtcatctaggttcaacatgaatattcctaacagaagggtagcttcctgttttctgaagagcacctagtggggtgacaaggaacccacaatgcagaacaactagcatgctgagatctactcctgaatgtcttgtatgtgttttcatttttttgagtattagcactaaccctgctcaatgcctgctgaggttcccgaagtgagcagtttccatcttcctcttcagtcatgtggatggctgctacagaccctgctgtgcacatgagaatatgagaatgagaacatttaagtactcattataaccagggccgttctcttcacaaagagcatgggttaatgatacaatgtaaattccccatggtcaaagcactttgttcatctcaattctacctttattttcgcaatagcagaaagaaactccattccaattttcatatgaaccccctgaaagactgtatgtcttaaagattgattcatttttatgtttgggtgtgagtgcctgcacatatatatgtgcatcacatgtgaaccagttgccagaggaggccagaaaaggatatgggatgccctgcaaatggagttacttcgtggctgtaaagtgccacgaaggtgttagaaactaaacctatgtacttgaccagagcaacaagcatttttaacttctgaaccatctctccaggcccagatggtatttttttaacactaatgtatattagtttcaaatgttacttctccgggtcaaatactttgtgttctttcagtaacttttatcaaggaacaaattttaaagccccttttctcctatttgtccttccctaaaactttaaaccattgactaaatttagaaaacatatcctagattatattattctattatatttatattttattttatagttattgtttataactatattaatggtttaaaataaaattttattttattaaaaggtcatataatatttttgaaggagaaaataggagagatatcaatcattttcatgttaatatatctcaatttcttaccagtggatttttatttaattatacagtatcattctattctattctcatcaactgtttgtaaatatgatcttttttattgaaaatagagtcctttctcatataacctatcctgattatggttcctcccagttcctccatacctccgctctcatccagatacttgtctgtctctcactagaaactaacaggctcctaagggataataaccaaagataacaaaataaaatataataaggaaaaccaaaacgaacacatcagaattagacaaacaaagaaagaaaaatagacacgagaatgagagaaccacgttttgcacactcaggaatcccataagaacactaaactggaaaccatcgtatacacacaaaggaactggtgcagatctgtgcaggacctcatgtcactgtgagcgtgtaggagctttgatcatgttgatttagaggtccttgtttgcttgatgtcttccattgcttctgtttcttacactgcttcttttcctgggaacctttagcccaacagagagggatgtgctagagatattcttactctctgcataatgactggctcagggtttctttatttgatcccatctactgcagaaagaaatacctctgatgtcattgggcaagttactaatctatgagtatagcagaatgtcatgagaagtcattttaacaccacatttcatttagaccagtattatttggttttactcttggaacctgggctctatagtctccaattcttggccacccaaacagtgttgggtatcagctggaatgggccttaagacaaatcagttgttggctggttatttctacaagttttgtgccaccagtgtatctgaatatcttgcaggcaacacccattgtaaatcaaaggatttgtcgctgtttttttgtttacatctcttcctgtaaaatgcccagtaccttcctgtgccaaagactctaaagcaatgggtaaaggcgctatagggcaccaggtcaagttttccatattcaatgagttatgtaggtctgggcttcggcagtgggtccttgccgtcagtttatagaaagcatcctggaggcttggcaagagcttggttgttgggtattccagtggaacctctttgtctaacaactgagttggaggtaacacagtctcagttctggaagcttcatttggtgacaagagatatttatccaggattctcaacagtctcaactgttgtctcatttagaatccatttgtgtgtgtgtgtgtgtgtgtgtgtgtgtgtgtgtgtgtgtgtgcgcgcgcatttcaactgtattaggcttccatactaccctccaaatgtcacttaattttagatttttctccctgtatcctttctcctttccttccctcagcttcccttcaccattcacatctttcatccctgcttctcttcatagttatctattccattttcctttcctaaggagatttatccattccttcaagccccttactctatgcctaccctatgtgattctatggattgtaacttgtttatcattgaccaaacagctaatatccacacataggcaaatacacaccatatttgtttttgtggatctgtgatatttcattcagtatgattttttctagttacatccatttacctgcaaattttataatatcatttttaaattactgagtagtactccatagtgtaaacataccacattttttatccattctctcatgagaggtacctaggttatttgcaatttcttgctattatgaatatagtatcaatgaacatggttgaacaagtgtctctttggtaggttgaagtgtcgtttgggtatttgtccaagagtgctatagatgaatctataagtagattgattcctaacttcccgaggaactgccacactgatttccataatggctatacaattttgcacttctactagcagtagatgtgtgtgtgtgtgtgtgaatgtaatcttaatgggtgtaagatattacattgattaagcattaacacaagtcttttgatataggccctttctgagcaaccctgtaatagttttaaatgtttgggtgattaatatatttgtaacatttttgtctgttctttctgttttgaaactttttaaaagtaatttttacaagagtttaaattctttgcttcctactcttattatggccacatacttgtatttttttaagaaaaacatctacaatgtataactctacccttgtccaatattttctctctctatgtatcaccaaaatcattccatatatatgaaaactctggcctctttcattactgactcttcctcccagacccttccttcctttatgcaggattctttggcagtctttgttcttagtgtcttcatccctgtctctgcatgaacttatgtttatactaataggggctaaagtaagagctcctgaaatgattgaaatcagaaatatttgtggtacaagtgtgcataattttttttctgaagtcaaggattaagttgaatactaaatgctgaaagcaatcatgtgaatataatgattgtatcatcatgttcttgaagcaaagccatcaggagttaattctcaccaatagaggtcatcatagacatgtaaactggctgttagatgtgttggagaaaataaatcttcctgaattaccaatgaagttctctccttgggtgttcctgggtctattccaaacagggtaggattaagagtagcgtaccttagagaggaaagagagccaggtacaggttggggatgctttgaatattactgaagttatttgttatacaagaattgattagattgttttagtatttgtatttttcttcgtgtgtgtgtgtgtgtgtgtgtgtgtgtgtgtgtgtgtgtgtgtgtttgtatttacatgtgtgttggcaattaggatgtggagtagaccatatgtacccttaattgatatgagtgttgatccaacctgtttgagtagaaagcaatttatctgaagatccatctctccaacctcacaatctctctttgtctctctctgtctctcgctgtgtctctctgtctctctctgtctctctctctcccttcctttggttttttttttttttttgattctttgtgagttttatatcatgtaccacaaccccaatcattgcctcaatcttctgtatctgtgctccccccttgtaacattcctctgcctgaaaaaaatccctctggccaaggaagctgcagtgtgttaccatagagtgttgcacagtatacacttttgtccaaacacttgcaagtgtttattgctatgagtcattggtctctgtttagagcctctgacttctgccacactattaatactggaccctcaccaagacacctcttggctgtcctgctatttctttgagtcatgaaaatgcttcaactttggttctacatgaccagtctcttcacaaactccagcagcttatgggtagggttgagttgagttgagttgagttgagttgagccagatcaaagcccagcatcaggccctaggtggtacctgagtttctcagctctccagatttccctagcccttgccaacaggtcctgttctaccatactatcccaggaaaggatcttctctcccatgaccatgccctgaaggtcagctctttctcacaaatgccagctcaccacggttgcccagttgaggagcaaggacagctctccagagtgtcgaagccttcaaagggcagggttagctctccttcactaacaccatcaggaccagctctctagcacccataccacgagagccagctatcataatatgttgatcggttgagggacatggtcagctcagcacaatgctcagacatctccatggcctcaggcaaacagacctggccagggacatcctcctagcctttggtggtaacacagaccttggacatcaacacaggcactggttgcaatgggaccagagacatgggtattaacatggtcctggatgtcaccatggcctcgggtggcaggacaggttactcatgtcaccaggtgacagtagagccctcagatatccacatcatttcaagtggcagcccagaccaggaacatatgcatggcctttggttataactcatgccacatacatctacacagacccaggctgcggtagaggcaaagacccagttttgtcctgagcccagacataaccatagtctcaagtgattatgcaggttcctcatatctgcctgttctgcacctatgtcactaacccaattcatctctccatacagtgaacaaaaccacttggttttgctttctctcccatccctccatcacatactccatcctccctgtctctccatcacatattagctcaacatggtggcatcctctgcaggaatagggtagaagtttccatgtcttccagctgccatgggctgaggggccagaactacagtgtaggtttctacaatctctgggcagttataaaatgctgccttccctgatttccagtgtgtaatgactcttgtgtattccagacccgttttatgttgctgaaggaaacaatgttattagaatcgtcatttataataacaggaatagaaaagaagaacaaaaagaaaatgtgtgtgtgaaatgaacagcatttttaacagtaaacagttacatctaaacgtgataaattttgcatgctattcataattttgtggtgtatgctggctttctgggagagaatatactaggatactcaaagactaaactgaaacaaacaaacaaaaaaattcaccaccaccaacaaaaacaacaacaaaacccaaaagtacatcaagtaggaaaatcactagactaaagatgaggttggcattttatttagcatttaggattccaatattttcctgtgctgctgtacattcatttatattcccacttctggcatattagataaacagctagctgtccagaaaacttagggcatagtctgccaggaagtatataatacaggctacttgaaaaggtaaaggaatgtgagctgctttgacaacagatgccccccccccaattctattttgagaacggatatgaagaatagatatgtaaattctttgtctgtttgaaactcagaatcattttatcagttgcatctctgattaatgttactctgttcctcaacttatcctaaaagaaaagtctgcagataattataggcttgtgccccacactgctgagtactatatagataagtattttaggtatatattccctcatgtcacatactatgaagaaccgggaggtacaatctgcaaccctagggaagagtgtggcttttacacagaagtaccctgcctgtcggtattctgttgtggaatttacagttcactggagatcagtctggacaatgctatgtaaacaagtgtggaaacacaggacgggaataaggctgatcaactacaactcacaaatgtacttccttcttaggtcccaaatatactcctgctgaatgaaagggtgactttattttcagttttcagaatgagagaaataaatgattttttactctcaaatttattatctttatatattttccagttatatacgatattatgtgttagttcaaaactgtatgttaggctattatatatttattatatttgtatcacatgatgtctgcaatgagtttacaggctcgaggagattgtacatctaaagatatttaaacatgaccacgttagtacagtgcagttaacttgtactattttatatttgaaaaccctggttttaaataaaaataattttcctttctcagaggaaaattgacttacggatttaatgttatattttcagcacgggagtgataagagttctgcttttcaaggaaatatttggattgttcacctcacttgacagccttttgtaaacagatacttagaacacttcctttcaggccaagaaacttatgtatgaagcactcgttgtgatgtagttactagcatggaggatacataagctagaaacaccttaaggaaggatgaccatggccatattttaacatatacaaagcagctcaaatgccttcctctggtgtttcactgcacatgggcataaacagaagcatccctttagtgacctaacattgcttttaatcatgcaagccttgttctaagagggaaggctctcaatctgaaatataaacattgtcagtactttacaagcaaaccacacactcatatggatagtgtaagtaatttgaagcctagggagccttatagttctctaagttcagcaaaataacttaagacactcatataagatataaatgaacaaatgacaaagctatataatgtgttcaagatgagaacgaccagaaggtttttattcctcaaatgcagtgttaaattcaggtaggatcagtacctctatcaggtgacacagtaaagctagagaaacaaaggtgatacaatgcaaggatccattctgacactcttagctcaaacacgcattgagtaattattatcaccattcaagttaagcttctgacacacaagcgatttattgaaaggaatttggactgaaaagccaaaatacttcctgacaaagttcttttgttgttgttaataggaaaacaatactgaactccgtctgtgctggcacaggagtaggtgaagttatctagataaaagtcataatacatgagatatgaacccttagagaagcaagtctattttgtctctctggtaaatttattatgtcactttgttagaaaacaaaacaaaacaaaacaaattgtagtttctctttgaaatctttcttaactactgggttcacgtcctaattgttaagaaaaagcagcaattgggaatagaatgatctcctttaaatcaacacttcaccctgtctgttcctatggtgatgggctctccaactgtctctgtacctgtttggctacttcttgcttctatccatgattccattccattctattctactcttctatcaattcttcaactggtgggcctggatctcttttttcttatagcctcaaggttcattcttctgcttttcccctatataattttcccacttttgatggtaccactcttggtttaacagatgtcttcaagattcaatagccacacccttggcaatgtatgatgtgcaggcattgtcccatccgtgtgtttctccttataccagagctttgtaataagtttatcaatatattatccccatgtcatctatagctccttctttcaccatgaggattttcactcaacttttctttaagactgagctcagaaaacacaccagagacctaacttttgccaaatccaaaatctgaatcactattgtgttctatctttcaaaattattttatatagtttatttcttcctcttcacttaaatactctacaaatttatctgtatatcttgttattattcacggcataactgctgagatgtaaggatgcaccaccatgcccgagtaattgtctatttactgctttctccatcaccagagtgcaagagcactgtatggaaagctttatgccttatgtttacttatcaaacttaagtatctggtgtattctgaagactcaaatatcattattgaatcaaatcgtcacatcctgttatattatatggttgaaattgtaaaaacagaaaacaccaacagcatttacaaataaaacaaacattttccggagtgtgatatctgactacctcttatgtccagacccatggtgtcttgattgaatttgaatttggaatcaatcgtttccatttgtccactgatttatacagttttgagtggactctctccaattgaagcagagtaaatgaatacatcctcagatgccattcataatagttagtattgcatgaaaatataaagctaaatcctactcacttttgtaagactatgacaaacactatagcccagtatgttctggcagatccaacaagaaacacttctgagccactgtggctcctccacaaagcctttctgtgctgaggttaagtgcttgcaagattaggctgagagaaataccccatcgtgttcccacaccttaacctttcaactccctgcccataatttattttcagttgttgacctaagtgagataccttgatttaagatacaggtaagaaaaaggctttcgtttttgttttgtatttttgtttgtttgtttttataattcagagtcacttgatggctagctaaaagaacacaatcttattttaatcccctctcaaaatacaagtaaacacattatttaattacattatatagctatttccatagctaaattcttgctctatctttttctcttgagcaatgtggaaacatcgagaaagtcaagtcaatgcctattacattcaaataaactgctccacacataaaatgaccctggtaactccccaggtgtggagtctgtagtcctgagtatctactgtttcaatgacatatttttgaagtttacttttaattagttctttcttcttttctttttcttctgcagagaaaaaaaattctaggcttcagtgtttagaatgtggaagtagatggtagaggtgttgggttccttgttttctcatttttttgtagggatccatccacaaagattctgactatgtttgtagatttttaatgtattatggttttatcatagagctgatgagtcttctaggatgctagatggcataagaggcagtgattttcaaggttataaatccaaaaaacaatgcatgaacttaactattatttataatctcggagtttcacctcagttcatttgcttttatacactacttttaattttattacatgttcatatgtatatgactgagtgtgttcatatgtcccatatgtatatgaaatctcctggagggcatcatcctgagtgaggtaacacattcacaaaggaactcacacagtatgtactcactgataagtggatattagccccaaacctaggatacccaagatataagatacaatttgctaaacacatgaaactcaagaagaatgaagactgaagtgtggacactatgcccctccttagaattgggaacaaaacacccattgaaggagttacagagacaaagtttggagctgagatgaaaggatggaccatgtagagactgccatatccagggatccaccccataatcagcattcaaacgctgacaccattgcatacactagcaagattttattgaaaggacccagatgtagctgtctcttgtgagactatgccggggcctagcaaacacagaagtggatactcacagttagctaatggatggatcacaaggctcccaatggaggagctagagaaagtagccaaggagctaaagggatctgcaaccctataggtggaacaacattatgaactatccagtaccccagagctcttgactctagctgcatatgtatcaaaagatggcctagtcggccatcactggaaagagaggcccattggacatgcaaactttatatgccccagtacaggggaacgccagggccaaaaagggggagtgggtgggtaggggagtgggggtgggtgggtatgggggacttttggtatagcattggaaatgtaaatgagctaaatacctaataaaaaatggaaaaaaaaaagaaatctacctgcctctgcctcccaagtgctgggattaaaggcgtgtgccaccactgccctgtgtaatattctattctttgtacttatgaaagagtgctagagacatactgattatggatgtataccaaagcctttgaatgggaaggagagtgaagaaaggagttgatgggaaacttgcaagatgacattaacagagggtctttgtatgaataaacaagtgtcgagccattctgaaaaaaaaaaaaaatagaaatctcctgagtatcataagatgtattggatactgcaggactggagttacaaatggttgtgagttaccaagtgggatcgaacctgaactccagtcttctgcaagcaagagtaagtgctcttaaatattgagccaatgctctgcccccccccccatttggatttttaaatactatcagcaattgctgaaaactttgctgaactccctatagagttgtgaacaaaagcaaaaatccccattcccgacagcacttcatttcactggtttaaaatatcaagaagttatttttacatgatatatttatagtgcaacctgtggtcagtgctatttgttccaattccctccatgctctgagtagctgcctttgaaaagtaaagatcttcaacaatctcagaaaactttgaatgtcaaagcaatgctctgtcttcaggctatcttccattttacttgctaaagtaggaaatgcataaaggtaaaataaaaatagttttattaattgtgtgatccataaaattgaaatgtcatggccataatcccaacttgaccaattcaggccagatcttcatacacggtctctctgcttactgagaataagctcagcatctaaaggccagttgtttcaggatccccagcatgtgtctgtacacaattgattaaagggagtaagatataataaaatcttataacagggagtgacacaaacagcatcaagaacctgtaaagctctgtaggtttcaagcagcacacatcacatgagaatgactgagaagatttgagcttagcaacataaggagtgactcttgcaaagatgagaaggtgagaaaatgcagtgagattattcaggcaggaaaggcacatcgctttccctgaaccagctgggatccctccatggaaaatgactctggctgcttgatttagtttcaagacagtttggacactgaaaattgattcacgtgctgttcttattggggaatgtgcctgtttgcaattatgggaacagagatggagtcctttctcaaccttagtcccagtagactttttcaaagacctaaaagtcattctgtctcatgactcctcattttgtctgtgaataacagcagctccacttcagaactgtgaagaacaataaacagattggaaaaccaaaagtggtcagtttattctgcacattcaccacaaatgttctggaaagactctctggcctgatcgtgcatcacggtatgctgacacgatacactggaggaaagttgtaggaaacactgtgattattttaaggatgtattgatggtaagagttttgtgtggttgtttttcaaaatcactatagtttgggaataaaaagaatttttttttcgatttttnnnnnnnnnnnnnnnnnnnnnnnnnnnnnnnnnnnnnnnnnnnnnnnnnnnnnnnnnnnnnnnnnnnnnnnnnnnnnnnnnnnnnnnnnnnnnnnnnnnnnnnnnnnnnnnnnnnnnnnnnnnnnnnnnnnnnnnnnnnnnnnnnnnnnnnnnnnnnnnnnnnnnnnnnnnnnnnnnnnnnnnnnnnnnnnnnnnnnnnnnnnnnnnnnnnnnnnnnnnnnnnnnnnnnnnnnnnnnnnnnnnnnnnnnnnnnnnnnnnnnnnnnnnnnnnnnnnnnnnnnnnnnnnnnnnnnnnnnnnnnnnnnnnnnnnnnnnnnnnnnnnnnnctacaattaggtattttcttcatttacattttcaatgctatcccaaaagtgccccataccctcccctcccactcccttccccctctcccaattcttggccctggcattcccctgtactgaggcattcttttgcaaagcaaattgttacattaattttaaattaaagagtcaaaaaattaatttcttttcctaatttttaggtgtgtgtgtttgtgtgtatgtgtgtgtgtgttatgtgtaaaggacatttgtgtagggtatattatgtatgcacataattatagctggtctgttccagtgcgcacccttgtagaaactagagttgacattctttaacctttcctcatgcttcttctgtcttatatttaaagatagtctcttagcagatttctagcttgtcattttacctaatctagttagctagaaaggcctaaatatctacttcttaatggtccttcttccagtgtgacatgtgcagaggtgacaatatcaaagcaaggcctgtcctgccctgccttgctttgatattggtgctagggaatccaaattcaagtcctcatgcttgcatagcaagcacttcacctgttaaaccagctccccagccttcaaaggattaacttccttgcaaagggagattgctcccatgaagatactgcactagaatcatgccttaacttcgtccagctgtgtgagatcaaccaacttgaaataagaagaatacaaactacatcctatcatgtgtccagcatctaccctccttccttgcccttccaactccctatctcctcttccttcctctcttctttctctttatcctcctcccctcccttcttctcttcttcctccttctacctctccttcccttcctcctctccttcatcttcctcctctccttcatcttcctcctccacttacttctcctcctccccctcctcctcctcctcctcacaccgccttctctccccaccttagccacacacactaagaccaattaggtctacacatctgtacatgggtatagggtgccatcactggagaatgggaaagttaccataggccatacttctaaagtaaattgattctcctgtctccattggccatcagctctcattggttcctcaggttacactgcagcctgtgagtccaccctgcagtgttgtctggcttgattttgtacaggtcttgtgctgtcaaccacacgtgctatgaactcatgactgaaacatccctgtcatgtctagatgatagcatttcccagcatacttccctggcctccagatcttaaaatactgtgcctttctcttctacaatgtttccttactaagttgggaagaatgtgatgaaatgtctcatctgggcccagataccccacaacacttattttcttcatttttactatgtgtgaatctctgtattaatgatcatacactgcgtaaagaatattctctgggattggaaagatattgcagaggttaaaatacttgatgctcttccagacgagctgagttatattctattttaggcacacttgccagtaacttaagctcaatttataggacatcatcttctgggattcacagagagagagagagagagagagagagagagagagagagagagagagagagagagagagagagagggnnnnnnnnnnnnnnnnnnnnagagaaggggagggggagggggaaggggagagggagagggagagggagagggagagagggagagaggggagagggggagagacagatagaaagagacagattaaaagtaaaataatatatttaaacagaaacttttatgatgaggggtgagttattctcatctctcagcttcttcattgttacaatagatgtggtgattctttcacagtaagaaggctcttgcaagatgagtcagtgtttgtagctgtgccagaagaaagggctctggtgtattactctgattcagaaacaagcagatcatattctcctctaatttgatatttaacatataccagtatctaacatttggaagttaagagaataacatggatcctttgggggtttgttttgctgttaattttgcaaaagtttaatgtataattccacatgatagaaatcgcctattaattgttctaagatagtgatcatagctacacactgtaatgcaccccaaagacatctatttactggtgtattctgataaaaacttgccacagaattcttgactcatggagattgtgatcatgatattgtcaacttttaagacattttaaaaacagaattgcaaacaagcatgaaggtattcagttatccaaaacatatatgaagaacacgcatcagttctttcaaggttttccatacatgtcagggattgaggctgtagcatacacaccatcacttctctcacatgcatggatagctcacctgcaggctcctaagccaagatgcagaaaagagtgtagtgtgctgttaacttacactttagagttttccactagattgaaaacagagggtaatatgattttgaaaaattccacaagctgaataaaggtataaggtgactttttccttgatgaatgaattttacgtttaaaagaacgtgaaaacaagtaaatgcagtggtgatcaccttgttctttcagtgtgaccaaactcaaaactgagaacactagcttttttttttctgattttttataatatttttattaggtattttcctcatttatatttccaatgctatcccaaaagtcccccatacactcccccccactcccctacccacccactcccactttttggccctggcgttcccctgtactggggcatataaagtttgcaagtccaatgggcctccctttccagtgatggccgactaggccatcttttgatacatatgcagctagagtcaggagctccggggtactggttagttcataatgttgttccacctttcgggttgcagatccctttagctccttgggtactttctctagctcctcctttgggggccctgtgatccatccaatagctgactgtgagcatccacttctgtgtttgctaggccccggcatagtctcacaagagacagctatatctgagtcctttcgataaaatcttgctagtgtatgcaaaggtgtcagggtatggaagctgattatgggatggaaccctggatatggcagtctctggatggtccatcctttcgtcacaactccaaactttgtctctgtaactccttccatgggtgttttctaagaaggaacaagtgtccacactttggtctttgttcttcttgagtttcttgcgtttagcaaattgtatcttatcttaagctgctatttaggataagtttcctgctagctcatagatgttttgtattcagttgtataatgcaatagtcccccaaaagccctatttattctaggatggaccatctatttttctctgtcaaagggacagaaatgtaacatcacgtgaagatgggagaatggaaagacactacaggtgcagtcagggcagaggcagaggatgagattttggctcctgcccacattgaacaaattcagtccagttctctcaaagaggaaactttcctcatgctgctatcagcaggtccatggcacagatttccatcctctattgtagcacattatccatgtcacacatccccatacctgaacacatggctgtaccttttccaggtgatttcatgcatatcacctgccttctttgtcttagatatcacaggggtctcacatcatcctatttccagcaagtaaaataagcacaataaaagcatagagaaacaattggagcctagaattagcatgtgcaatatgtaggaagatcagtcttgaaccaatctctctctctctttcaaatttatgaaatgaatcctgaacctttttctgcacatttatactttcattaaatatgctgtgacgtttgtttatttgatttattcatttatttttatttttattagatattttctttatatacatttcaaatttcaaatgctataaccgaaagttccctataccctaccccaaccctcctcccctacccactcactcctgcttcttggccctggcattcccctgtactggggcatataaagtttgcaataccaaaaggccactcttcccagtgatggccaactaggccatcttctgctacatatgcagctagagacacgagctctgggggtactggttagttcatattgttgttccacctatagggttgcagaccccttcagctccttgggtgctttctctagctcctccgttgggggccctgtgttccatcttatagaggactgtgagcatctacttctgtattcgccaggcactggcatagcctcatatgagacagctataccagggtcttttcatcaaaatcttgctggcatatgcaatagtctgagtttggtggctgattataagatggatctccgggggtggggtagtctctggataatccatcctttcgtcttagctccaaactttgatttatttttttgtttgtttatcttggattttgagacagggtttctctgtgtaaccctggtaattctgaaactcactcagtagtccaggctgccttccaactcagagatctgtctgcctctgacttccaaatactgggactagaggcatacatcactctgcctggctttatgctgtgtttttaagtacaggagtaacatgtttagaagatgtcatttttgagaagacacataattttacatcagttactattttggctgactacatcttggaacttttgagggttcttatcttcagtgataaggagaaacatttcaaattttaagtatattcattatttttattctttttatgcagacttccccctcctttttttttaacagtttcttctccaaaacagactctcctctccctctccatccccactgtgtgtgtgagtgtgtgtgtgtgtatgtatgtgtttgttgtgtgtgtatgtatgtatatgtatgtctgtataatgttatataaattaatggactttaactctaagatgaatcatctataacaatatgcctaaggtattcctcaaaaccagagaattagttatgatgtatgaaatgcatggaaggtttaaaaaatcatacctgtatgcatatgatcagtctctcacacacatccaggtctcagaggactggcacttaacttcaccgagaagacctgttgagtataggatggcccttcatgttcactgaactctgtacacctcagattcttagtggtttctgtatcagaggtccccaacctcatttgaaaacagtattctctaattataggcttttactaactctaactttatgatcccagcctcccaggaagggtaaaaattagcattaccaaatgcttcagtgattcaaacttaacaagactgatcttaatttgtgaatttgcacatttgaatttctctagtgatcacaaatttgtcacttgcataggcagcctcaagtcaatttttttttcttttttcaattttttattagatgttttcttcatttacatttcaaatgctatcccgaaagtcccctatacccttcccctgccctgctcccctccccacccactcccacttcttggccctggtgttcccctgtactggggcatataaagtttgcacgaccaatgggcctctcttcctaatgatggccgactaggccatcttctgctacatatgcagctagatacacgagctccgggggtactggttagttcatattgttgttccacctatagggttgcagacccatttagctccttaggtactttctctttatgcatgtcttgagtgcatcgaagacagccatcttaaatgaaattatcctatagtttgatctgacattttgacgtttttcctgttgataggtaccctagaaaatcctcacatcttccccctttctttacgtgaattggcttagagcatagcacacattctacctcttctctgaatttccctgtgaagtatcttaagggataaatgcttaaactcagtacaggtcccagcatggccgagtttctgagtgggtaattgtatagaatcataagttcttttcctttacactggctttgtgtagatcttatgctttttcattacatttaaaggagaaagaatttattttgtatcttgatttgtgagcatcctgccatcttgtttgggtgcacatatacacacaaagcacacacatcacattgggtcaagatgtggaagtgagaatgctgccccaaggagggttctctcttttgttcccttttagcctagatggcctctagcctatagatgacacaactggtattcaggatgaggactttctctgtcagttctcacaagcatacacaaggaagaagcatgccttagcagtctccagtagactactaagtccaatcacattgagagtgttgactaactgccatcttctttagatgtccacccctatgtagttcatagtctactcactaccagaggcaatcctgagttcctgtactgcaatgcacacaagtgtccacaacgtaattatcttggaattgtgtgagatgaaaatacaagattctttactaattaagttaggaataattttttgcattggtgtatggctcatggttattgaaagtctattagatttaatttgtactacctgttcttttcctgttccttctagctacatgccaccagaaggcacttataacccagccctgtacaaaggcataagatatcataggatgaagcactatcgaatatatgaagaacaatggtttcaataaatgtgatctgtctctgtgcttgttgtaaagatacttgatgtctccaatttcagcaacaaagcattatctacctccttgtctaaaatagtttagtagttctcattatcaatttgagttgtgaactggcccacctgaaataggacctgctctaaaactagactgcactaaaaactcagagaaaatgaaattgtttaatatacactctgaaaatccattgtttccatgtaccagggcagtgaagttcacccatgcatccagttaatatgctaattctatgtgagggtgatattatcaagtgctaccaaagatatggaacagcacacataatttctgaatcaattatttgcatttatatcatttataattggaagtcttatgaaaagaaaattgtctacatagcgtgattgtagtttttttatctcactcatggtccctgtcaaatgatgaaataggagtgattttactcacattatgtaaaagaccactagtattaattaggcactgccatgtttaactgacgccctattaattcaattttcaaactatttagcattttaagtttcttcatctgagttatcagttacttccagaacagtgttttgaacttgcaactaagaaacacgatgccattttggttctttcttgcattttttgatataaagttgtgtgtgtgtgtgtgtgtgtgtgtgaatgagatgtctataactgaatactctttctttattcttttattcatacattaccacatacaagataaaattatagtgtaataagttcactggtgagaatacctatattttagctgctacgttagagtaaggtaaatttttaattagatttagatttattataaactcattatctatgatctggaggagactggtccatcctcaagtatctttaatcttaacattgcacatacatatatttgtgaaatacctcctcagagatatgacagtataaattatttataccacttcccttggcaaatagaggcagagctcagacataaaatggtaattttcctcttaatttcctcatcatgtgatgggagtattcctgtctcaagacatgttttgaggtacttatggcatcagaaaatgtgtggggattttcctcatttaacttccatcaaatattcttataaggattatgctttccagtgacgctggctagatgctaggaattcaatatagaccacaaagggtttctacttttgtgtgctatcttaggggaacttggggtgtaaaaaaagaaattagaaggacactggattaaaatattcttggtataaagtagtatggagcaattagaacagttagaagtaaacaagtgtgatctgtgacagaatttcactgtaaatatggtcaaggaagtactggatgaaatgatgacatgtagatttgatggttgaaagtgttaggatacactagcaagattttatcgaaaggacccagatgtagctgtctcttgtgagactatgccggggcctagcaaacacagaagtggatgctcacagtcagctattggatgtatcacagggctcccaatggaggagctagagaaagtacccaaggagctaaagggatctgcaaccctataggtggaacaacattatgaactaaccagtgtcccggaactcttgtctctaactgcatatgtatcaaaagatggcctagtcggccatcactggaaagagaggcccattggacacgcaaactgtatatgccccagtacaggggaacaccagggccaaaaaaaatgggaatgagtgggtagggaagtgggggggagggtatgggggacttttggtatagcattggaaatgtaattgaggaaaatatgtaataaaaaaaataaaaaagaaaagaaaagaaaagaaaagaaaagaaaagaaaagaaaagaaagtgttaggatctcaatatttctcaagagaggatgtctcaggtagagtgaattaccattgtaaaggtggtttaagaaaacaaaaaagtaggaggcagtgagatcagtgaggtgactcagagattataggaatctaccaatatgccagagtatctgggttgtatggtaggaccaaccttttgggatgagataatgaattcccacaatatgcccttcgatttccacacatgcactaaaacaaatacaccctcaaccccacaacacacacagctattctgggtccgtgaactgtagaatgattatccttcatagctaacatccacttataaatgagtaatatcatgttaattgtccttttgactctgtataccttacccaggatgtttttttttctagttccattcatttgcttgcaaatttcatgatgttattttttttaacatctgagaaatattctattgtgcaaatgtacattagaatggaggaagagaatacttggaaagcccgttgaaattggggggaggcatcttgtgaaatgagctagaaacatagagcaattgaaattctctggaatctatgacggggatcttacttaaaactcctagaaatgggtaatgtgtggcctggaccacaaccatctcctttaatcaggcaagacttccagtgaaggaattgtgataacccatccacacatctcaacctacaatttctcttgcttacaagatgtgcttaggtaaagatggcacagaaattatagactggtcaaccaagattagagagaccaagcaattcaactggagaccacctccatgtgagggagactaaccttgacactacctaaaggatcaggaaccagaaacaggataaaccggaaacacaggatggaaccaaacaggactggcaatttaaaaaggcaatggaaagatccataatgatatttttctgtacttttagacaagtgcctaacacaatcatcatcagagaatctatgaccattaactgatggaaacagatggagagacccacaaccaaacgttaggcaaagctcagggaaaactaaagaatgatggaaggggtgatcataggaaccaaaagatcagggacactaaagaaagactacagaactaattatcctaggctcgggggggggggggcacagagactaaaccaataatcagggaccttatatggatctgacctaggccctcagcttatatgctatggttgtttccttggtgatcttgtaggactcctatgagtgggagcaggagctgtctatgactctattgcctgtttgggggatggattctttttctcctactgagttacttcatcaaagcttaagacaataggtggtgcctagtctttctatggcacattcggttgataattcatgggatgatgcatgataattcatgccattactgaaaagaaaatgaggaggcatggatggagtggggagagacaggtaggggaagagaggggggaaagtgtattaaaaatataatatgtaagagaagagacgagaaaaggaaaggcaaggaaacaagaaggaggaggaggaggaggaggaggaggaggaagagaagaagaagaagaagaagaagaagaagaagaagaagaagaagaagaagaagaagaagaagaagaagaagaagaagaagaagaagaagaagaagaagaagaagaagaagaagtcaggctgaagatgccatgtggaacaaacaacactccttatgagtttctccttcagttccttcccagaagttcctttcttgagttcctgctttgctgtcccttcttagtggattttaagctgtaaaacaaaataagccctctcctccccaagttgtttttggacgtgctactcgccatataaacagaaacctaaatacagcagtactcaacagtttaaacccaattcagactggtgagtccttgactctggtagcatgtcatcctttggttgtacccaaaaatagattaaaaagaaaaagaaaaaaagatggaaaagagaaatttttttttcatgaaaagttttgtgtaataggttgatttatgctagcctgggtccatttaataaccagggttcctttttgaggataatttacttcaaaaattacataatgacacaagtattgtttactaataatctgtgatcactgtgtatcatcaagattaagagtatcagccagggtcatcttttgtactctgttttattatctgaaaaaatattgttacttgccgaaaatattttcctttgaacatgtttcagttccatactatttggtttcttcatctttttcccccatatattttgtatatgtaaaaagcaagacttagcaaagagacaggagatggagatggatcatcatatcattgttataatcacttcctggagaaagtagccaaaaataatacaatggaatgtataactttattggccattgacttcaaaaaagaagttgcttgtggaccaattaacagaattttcaggtgatttctgttttgaaaggagaaaacattttctttactattatggttagcaaccctgactaactggtccccagaaagacagatggcaatgaatattttccctgaaaatttaactcatataataatgatataaaactattcctagactagccatatgcatagtattttgccattgccaaaagataataaatggcattatatttaataataatgagaattattcaatactgggaaatttgaataactagaacattctggaatttaactaaaagcagatggcccttagcttttactactatgaaatgaaactcattgtcatctatctttcacatgaaccttgtctgattcaattaaccatgtgtagagctcttaagtacttggatacactattgtgaaacacattcttcaggatatttcattaattatctacgagcagcaacatcttaatgaggctcttagaaccttaaaatcttggatatgtatccatatcttgaatatgacatatgtatataccataacacacacacgcaatcacacatgctgtttgggaattccaaaccaaaggcatttttcctagcttttaaaagtgttctgaaccaacacaggacaattaggggacctaggagctattgtcaatctattctgtccaacatcactgaagattgtcatcttgttaagaacaagtaggtcagagaagttcttagcgtcagtacagagctctcatggttctggcaatttaggctatccaccacagtctgtacagagagtcagattcttgcctgcagcttcctattaaggagcagaggtctgaccttcaggcaggttgaaacaaattaggctgtgacatttttgtaattgggcagtggccctcatgccccctctgcctctatggcacaaaggtctaccctcaagtaagaacccttgaaccaagcactggcaagtgaaacatggaaacatttctaagcccaattcagctgacacgcaactgaaaacatgacatgtgggaaaaattgcaggagagcttccaaaagtgcatgtcgggtcagaaaccgaggtgttgtttggggatttgctagagggtttcactctaggatgactgttagaaggtatttactggatggagagccacactctgtggttttacaggtcacctgggtgagcctaacattcacagaagcctggggacactgttttcaggcaatattgcctgcttctcagtgtgccaaaaaaatatctaggaagcttctctgggatttggccaaatatttctgtctgtaatacttatttatagtcagtatccattcatgaaaacctgttgctctgaatgatattcgactttatgtagaaggaatttggtgctttgaactaaaccttattaaaatatttgtttggaaacaaaaatctcctaaaagaatacttatgggaagaacaaaaatatgtaccaagctatgggtgtcttcaaactgaagcataacttgggttaacagaaccacaaaaaggtcatggaaaattcagtgatttatgtttgcatgtgtccccgaacttaagctaggcttccttcaatttcaaaccagtgatcttaaagggagagaaatgatgctggttttcttcagttaaagtttaaaatgaacgatctttggttcttaagtttgttcatctgcttgctctgaaatggcataaaacactatcttgtgactggatatttttagaagtccaagtctgtttgaattccagataggatgccttaagattctatttcacttatatgaccatttatgctgaaaacagtaatatagcttcaaaggcaatctttgctgtcgcgaatttaaaagccgtcaaagaatattcttctaaaagctaaccttttcacatcttaaaatattcatctttctaaatacaaattttatttaacatgagttttatacatggaactattttgaaagttacaggtgggagaagaataacacgataagactttcattgttaaaaaaaaaatgcctttctcattttggaattatatttaatcactttgtgttgtttttgtttttttacttacttttttgttgctcatttgttacttggtctctgttagctactttggtttatagtgacttgctctttgagtgtgtgtctcactgtatggcctgcaccgaactcaacctcacaatcctgcttgagtcttcccagtgtggagagagtataggttttcaaataggattcaggtgggcggcatgagaatgaacctgttaaaacttgttcaaggtttttttattattattatttttaatgatttatgggcacttacgtttttgaactttctctttaaaatcttcaataaaatcttcattcattctgagttttaggtgatgtatgttcacattcagaattttctctttgttcaataggacttttgtattgaaagaataatttggggagggaggacgggatatgggttttcaggggtcgagaggaaacagggtaagggaataacatttgaaatgtaaataaagaaaatatccaaaaaaaaggataattttaaatcatggttctactgtattgcataatgaagtaaaatatactatatgcatcttaatttaaatctagtaactagtggctttatagtgtttcagaataatacctgcatttgctatgaagaatcccaaagttctgcaactgcatatcaatatagcattgggtacaccttgcctttgggaaagtctggagtttgggaaataagaactcttaacttttactgcaaactttatatgttgttattatacttcctacttcctattttaacccctatagtttttcaacaaaaattatacaaagttttatagatatattcattggggctgagctccaaaactctgtgtttcagttgatttcgggtttttgtaccactggcctctttctgttgccaatggaagtttccatgatgaggtatgatgactataacgtatctgtggatataaggacacatatctagaatgtagtctgtgattctgctggtttagtggaagatccagtctctcctccaggatccatgacaatgttagccctaggtagtaggataggtttactgtccatgtttactgtcctgttgatcatgtatgactttattccaattctataaaacaactcccatacctatatttttcagtgaagcttgtgtaagagaaggtagaaaaattgtaagaaccagaggatcaggtagtttgctatgagattatgtcttctagtaatttcagaacttattcccataaagtctcactaacatgtctgcctaaataacatagatatgacaaggtggaaagaggaatgaccactcagtctccgctttatacatagaactgcaggaaaagaattctgagagcaagagaaatagtttttcttatggaagagcacagcaataccaataccaaatgtctagttctgaaaacatacatgcatacatacaaataacattatagagaatgagaaggttgtgtatgtatgtggcaatagtatattgtttcagggcaaagtgttttataaatggattctgtctcaggaaaacagtatactacataggaatttaggaaagagaaacatatagcaaaaaagtttgccaatattttggagtaaataggacttaaatattaatttgaacagtgtagtagaagaagagacatctttactgataatggaaaggttgggataatgtggttctcaagagaaaaactatagcttaagtaaagcaggaaatgaactgagcttactaagcaaccaaaaatcaaaatagattgtttcagcagagtaagggaagattaaggaaaaatacaggattctatatatatattccacacaagtttcagagttcattgttggggcaatggaattgggaaactctttcccctatatctcagtttcttttttttttccattttttattaggtatttagctcatttacatttccaatgctataccaaaagtcccccgtacccacccacccccactcccctacccacccactccccctttttggccctggcgttcccctgtactggggcatataaagtttgcgtgtccaatgggcctctctttccagtgatggccgactaggccatcttttgatacatatgcagctagagtcaagagctccggggtactggttagttcataatgttgttccacctatagggttgcagatccctttagctccttgggtactttctctagctcctccattgggaatatctcagtttcaacttaaacaattccacacagccaataatttagaatagtgaaataccctagcttttaattggtacaaaaggctttgtattaaggagataaagtgctcgcacatgtatgattgggtgttcaagtgtgcatttgcatgtgagagatggagtcaccattaatcacaataaaagcctgcagacactcacctaatgaggcaagaaacaagcagagactggataaagcgagttttgtcctattttgctcctgagacatctttatcttctgtaataatcagcagtgattattacacgtcatatcattgagagtgacaattacagacctcttcttcaggaagtgattgcaccactagacagaatgatggccagaatgatgcttccttgtggggactgactcctcccatcatctcacccaagatattgcagaatagtatcaactatgtacttaaagcagtacaggcaaatctccttcaatggacaaacatgttatgatgattcagatatttatgctgaaagtcaacatgaatctcagcatagtgacatcattctgaggatattgccctttggcagagagtgtttcaaaaacacacacactatggagagtcaggtgtcacattcaacacagaacatgtgaatcaaaggtttttctgaggtgaggattgaccaattagtgaaaagctaaataccagaccataaatctatcccaaattgacttgccttggtcatagtgtctgtttacaacagtaaaccctatgacacctttaaacaaaataccctgtttcttttcccactgtggatcagtacattccattgtctctactactcagtgaccttcagacttgggtcattatgagaatcactttcatggattgttaaaatgcagcactagcaggacatgtgggttttgttgttgttgttgctgttgttgttttgttttgctacttagctctcctgtgactcccaaatatttttatttctaaaatgttggcagattttaaannnnnnnnnnnnnnnnnnnnnnnnnnnnnnnnnnnnnnnnnnnnnnnnnnnnnnnnnnnnnnnnnnnnnnnnnnnnnnnnnnnnnnnnnnnnnnnnnnnnnnnnnnnnnnnnnnnnnnnnnnnnnnnnnnnnnnnnnnnnnnnnnnnnnnnnnnnnnnnnnnnnnnnnnnnnnnnnnnnnnnnnnnnnnnnnnnnnnnnnnnnnnnnnnnnnnnnnnnnnnnnnnnnnnnnnnnnnnnnnnnnnnnnnnnnnnnnnnnnnnnnnnnnnnnnnnnnnnnnnnnnnnnnnnnnnnnnnnnnnnnnnnnnnnnnnnnnnnnnnnnnnnnnnnnnnnnnnnnnnnnnnnnnnnnnnnnnnnnnnnnnnnnncaaatgtacacattagaagagttaaatgtgtgtggggtataaactattctgacaaatttgatcaatttagtcattcatttgattactgaagtacttaaaatacaaaattttaaccttgtgcattctaaacaaaaataataatccagccatagtagaacaatgaaagctatggaaataaaatattattctcatttggactacttaggctatttatatatttcgttaaaatacctgtgtaacatctcagctgggtgaatgctttgaatggtcctgtaaatataatcatctgagcaaaacacacacacacacacacacacacacacacacacgcacacacacacatgcatacacacacagaacaacaacaacaaccacaagcaaacaaaagctaaaaaaaaaaaaaaaaccaaaggcaaaacaggtcatttcaggctggctaggtactgtgagggaaataaagtaggtaaccacatttcagagactggatatatatatatatatatatatatatatatatatatatatatatgcattttggtataattaactgtgaatgtcttttgggatggagtagcattagattcagaccagactgatgaatatcagtcacctcatagagtgctaataatcatgtcaagaattagcataaatatagaagattttcagtaagaggaaaattaagaaaatagacagtaggctgtggaacttgttagctatggattggagcttgatattattctaagtgttcaggggtttcatggagaagtgacatattatgctttgtaatgattagatcctggggtattctggaagtgatgttccaatctagggaacaatagtctcggttgtagtgattctaaggcactttcgagttgaagacaacttgatctgattgggaaggtttccccaagaaagaatgtgaacaagcgaccctctggctgtgctttgttgctaggagtatggcacccaactggggactgcagggtgaagatttaagctgaatcttggctatttggctcaaggatctggctatttactgttctaaggctgagttggaggcacagtttgttagaagcagctttgcataaatcaacttctctcctttctttataaagattgtggattggtgggggggggggagtcttcaatgactttcaagtgggaaagccatattatccagatgataggccatgattcagccctcaaacttagccaaaaagcatcgtaaaaagtcttaaagaactggatgtggcaagacctttacttacatatgttgaaaattgtacagaaaagtagatctatatacttctctgagatttctatgaaatacacacacacacacacacacacacacacacacacacacacacatatattcattcctaggagacacagagaacaaaccaaataataactgtgcttattaaccacatagctcttggctgtgtgaatgcccgaatgttttaagttacttaagacattttgctaaatattaggtagtgatttccataatggtttaggtataaagacatgcagcatgttattctcatttttatctgctaagtgtgtttcttacagaaggtaacttgccacatgcattgtacttgtattctgaggagctgactctgagagacccctgaaacacatgcctgacctgtgcatacatagacacagataaatacaaagatcaaagtttgagagcattctggaaataacatatgcaaaagcacatagaaacatgaaactgtctgagtttttcctaaagtaatacatttttaaaaattgaaagtctgtggccaaatcattgaaactgatgtaaatgtctatgactgtttaagttctctgagcaccgctgtttccttcctaatataatttctttttgtctaaactgtatttcctcttctttcatgagagaggaagtaaatctcatattgtgcattctattctgaagatctcattactcaatgactccttaaacaccatctgcagtgcacgtgtggcggcctccattatgtgggtggctcatgatgccaaatttagcttggttgtcagaagcagcttgccagaacaggtcttaagtattttttcctcttctacttaagggactgacacaggtaaagcattgcagaaatttttatataccaaagagaagagccattgaggttgagtgtctttcaagggcaatttttaatctagaatgtttaaatactttgcagagaaatattaccgtgagatagtataacttatactagcttaaggtataaagttagatgtaatcacatacgtctactctttgcaaaaggactatgaacctggcctagaagatttatgtttcatggtttacatgcttgcgcaatgagcactacacagtgatctgtgcaacgaagacaataaggcagatataaaggttatagaaaacgtcttgaaatgtaatgtgagtgataatgccttcacttccttatccacctttctcagttctgaatcacaggaatgctgagctaggaaaaaacagagttcacggtatttcatctgctaagaagacaaatttaacatgatgacacttaacacactgttctatgatgtagagcaatgctctctctctctctctctctctctctctctctctctctctctctctctctgtgtgtgtgtgtgtgtgtatgtgtgtgtgtgtgtgtgtgtgtgtgtgtatgtctacgttcatgtgtgtgcattcacacatgcgtgtacataatacaaatatacgtgtatgagatttaggaacctaccagttctgagttgtcactttgtttatgtgttaactcttgcaagtccaagtcgtcctgcattcaaaagaaggtgcatccaatgtctccagttaaaacacattcactatagatttttcagatatgcatcatttatctgtgagagcagcgtggggtccattcaaggcagcatgcaactatttcataaattgggttgatgaaatactacccgactcatcatttctttggttactcatatctgtagagtatacacaatctgctaagaaccattctatagtttagtttaatatatatgtattacagaaaagaagagaaatgcaaaataaatatgaaatagtctaagagaggcaaacatctcctgtgaagcttaaagttacatgaattctctgaacacagactgtatttttcttttttcttgatgactagctcttataaactgagagaaagtctgaatttccttttggtatttgtcactgactaatatcagtgagagaagctctgattttagccatcaaacgtggataagaagttctgaatgaatggcttcagaatcaaactctgtctgtagttggtgtattccacagaggaacctccaagaatattctttggtcaaggagagaaaagaatttgccactaacgaaaggcagtgttccgctttacacaatgcaaagacctgtccaagaggtattcatgtgtgctagcatctgacctgcctgacaagatgtcagtggaaaatgaactcacagagtcacatctcatgtcccttggggcaaagaaagacatggaaaggacaaagaacaaggctgagaagcagctctgaggcaagggctgacagcaactgcctcccttttctcactagggaaatgcaacaagtgttaaggaactgagctgtccgatctgctgacacgacagttttgtcccctcgctaggacttgaaatagtcttctattaacatagctttaatgtagaggataaggtttaatgataagtaataacagagtgatcactaatcactctgagggatctcagcaattttcttctactaaatagaaaatccatcataatcgctacactggggattcaaaggcagtcatttccccagggacacaatattgtgattttttttttttgtaagcccatccccaaataccttcagagaaagattctgaaaatttttgtagaaataacccttagtgttgtggaaaactctgctaaacacaggaaagcctctttcaagatcatgttcatgttaatttcgttctgccttcagtgggtgtagagcctttacagtaaacctgtaaatgggaacacacacacacacacacacacacacacacacacattgttagaacattggctacccctttaatgcactggtagctgtaaaagtcccagatcctgtgacttgaaaagctcccctgcagctctcccaggacagagtattaaggtgtactgggggttttctgaagttcctaaattatgttcctaaccactatctagctcttcaagctctttgtcgcatgcactatgttgacctaaatcacatggtagaaaacttcctgccatcccctaaaagttataaaagttattccttttctctggggaaaattattaccatgttttctcagaaatgtcccctttcctctggtttccaaggaaacagtttctttccctataagacaccattatgtttacatctccatatattgtattccttctgactaatggtcttcctttcacctcatgacccaaccatagccttgtggccctttctcccaataaacctgactcctgaagagtaattatgtgtaacctttctgtctcgattactactgtatttgccttattattttatttaacataaattaaattgtatatagtttatttgaggcaagaacagcacgtggatcaggcagccttcagacccaagttcagagggctcaggttcagcattgtcttcaatggagttttataagatgaaaggagaaccaaatgaaaccctcacttgtttagatatagcaacgcacaaagaaagatttgttaaaggtgactttgtgttttgtaactggttaggttttttttcctaccgtttttgtttaaattggacttgagtttgataatatatttaaagtgctagagctctcaacccaatgtctctcaattaatctttttgcaacagcgttagtttcagttgtgcattacagagatttcaatgattcgtggtaggttataaaatcacccatttctcacaaaaagcatgaattaaaggaaggtggagcaaatttccatttctggtctcatactatggaaggtaattctgaaatgcaaagcattaatttctaatgaccattaatttttcattctctcctgatctctgtctctctctttttctctatcttccccctctctcaatctctctctctcaatctctctctctcaatctctctctctcaaaatctctctctcaaaatctctctcaaaatctctctcaaaatctctctctctctctctctctctctctctctcacacacacacacacacacacacacaagcacaatacagcacttgcctacacacaaacacacatgcacacaaaggagaaggtctcttaatttttcatttatggttgaacatactaaagcatgctaatactgttctgcttctaatgactgttgagaatgaaaagatttgctagaaaaagtggctcagtgagtaaagtgcttgccatacaatcaggaggacttgagttcaaatccccctatactatgtaaaagccaggcacagtaacatatgtctgtgattctaatccttctggagatggtagcaacctgaaacagaaagatctcccaaaggttttatgccacctagatctgcgtcatccaagggcgaatgaaggtcctcatgtgaagctctattccacatatatgccatggctcgtaacacacacacacacacacacgcacacgcgcacacacacacacacacatcagaacaaagaaaaaagaaaaataaaagaaatagttgatgtttaaatttcacctggaaactctgttgatggtgagaatctctattttagttctagaacttctgaaattaaatgtaaatattagatatcaccccttcgtgtggagctctgtgtagaaaacagatggacaagcagatgtgcaagaaggtgcaaatataggaactactctatgaactttgacctttgacctttgagaaatcaatcagaccacattaacacatgtgttttggattgtaatgtctttgaccttttaggtcaaatgcttcgattttttttatatgtttctacaataataggttttgggtttcaaacccatggctgtcaattattgtcgtttctcttcccatgtgttcttttgccgaggtcacttctaatacagacatagaaatgtgtttcctatttccaatttatacatggtttaaaactttggctagctagtccgtctctttctgtatcgatttttgaggctcagtgtactcagaagtagtgatgaaaatgcagggaagaagcacaaaggttgatccagtcaaagatattatttggctacagttgaggtcagagactgtgccctggtagctctctaacaagccacacttggccaccaatcctcaacagtccaattagtagaaaaaatagtgaaaggcccacatggcaaaaaggagcaaagaagttcactgacacccatccactgagcccatcttctagattctgtcagcagaagtagatagatggcaggaggtatacacaattacacaatctcattcagtgtgttctggtgcatcagtgccctaccatgatcgtctgagctacatacaggctttcctgcaagatcctctgacgtgttgttagaaccatgtaaaattagttcctgagtggcaacttcttcctttagagagcaccagactttagccccaatctcttctcaaaataagatagtcttacagggaaaccccagtttaccacagagcagggcttaaagcctctgatcaaaaaggggcagagaaaagctatctggtccatgggttctcaacctgttggtcctgtccctttcgatggtcaaacgactctttaatatcggtcacctaagaccatcagaaacatcagctatttacacgtattacaatatataacagcagcaagattgcagttacaaagtagcaatgaaaattgttttatggttgggggccaccacaacatgaggaactgtattatggggtcacagcattgggaagattgaaatctttcaaagctgctcctccgggccaggagggttacagtcatgcaggatcaccgtttctggagcttccacactctagaaatggtttccttaaaatgcttttatccattggatgctgggtcttcagatggcccagggaagcactaagaccctcctgacaccacagtcctgagagagtataaagaagtctgatcgtcacaacagaaatcattcaatcatttcgtaaacagtgcagttaggaagctacatgaaaaccagttactaagttggaaaatagaaatacatcccctgcggagtgccagtttactcaacaaatatcagttctatgaccgtccgtttctttctttcctcattataattctgagtaacaacctaaaagtgcagggttagagaaagagcttgagatacaatgttgccaattattattgttctggttagacggttgtattgtgatttcttgtagcaaagttaaaactatgtttcggccttgccagtacaaagtcatcagaaaaaccagaaatggactagttacccatggttatctgtgaatcacaaaggaactggtgtgctaatttctaaattcttccagttttgatactttccaggtggttgtatgagttgaaactagttaggaactgataaggtgtttactgtttgtttgtttgtttgtttgtttgttttagctcataaattcccaaaatagagtaaagaaaatatgaatttttgtttgtttatttgttttctatagttgagacaagaaatgggagaggcctggagtggcttactaatgttcgtcatttttactgctcactgtcaaattagtttacagtagtaagtacttgctttagggatgagaagcacacatttgtgccttaaagcaatgtgctttggcatgataaatattttaaggggttttatgaaataaatatagtaatttttatttattttaattaacagttatctctctgggctttggatttttgtgtatttatttctaattaccttagaagtctgttcattggctctggtcaggttatgagtatatatgtttatcaagatggtttccttagtatcccaagaaggtatctagcagcattattaatctttgactaattgttttagattgttcatgtttttttcatagccattaactgtatttggagtagtttcattcttttcaaatctttttatgtttattatatttaaataacttatatgtcattgtttcagtgtaatcttagaaacatcttggccacaattttcttattgtgaataaataagaaacaaggactttgagtacctcaagactttgcatgactaaatcaagtgataaaatgtttgctgtgccatctgaaccattcaaaagctttagaaagtactagatattgttaacaagtcagcattgctgcatcccattttctccttttagtgaaattcatttatattttcagttctattgtgcttccccaccccaaccctagtgagcatgttctatgatgctttttgatgaattcaggtagtttgactcacaattttgcaaaagctttctgactttcctctaattcccagaattaattctgcacagcaggaatctttgtcctagacatagtgtccctgctaagttgctgttgccatctgtcctaggtcatgcctaccctagttaattatgtttcccctctgcacctctgaaaataaactaggcctcctctcctgtccccaacaaagacaggctctccactggttccattttcaccagctctgccagcagtggatagaattggccagtttgttgctcttcctctgactcactgaagaaacttaacttataatcaaggatggggattctgcccctagctgagcagctgagattaaatcttagtaactgagaagtaggtgatgtgcctgaagaggaagctggaaggattatggcacaaaaatgcacgtgctcgggagcatcactttatgttttccccaatagattctcaacttttttttgtttgttttttaataaaccatcctggtaacagaatacactcttagcaacaaagctcatacaaagttgcttttataacttggttatttattacaatgtttctttcaattttaggacagaatatctctcctagaattttataatagagtgaggaaccaaagggagataaagtgctggcatagcagcaactgaactgaacttttaattttactgttcatatttaggaagctttgcagagacagcacaccagatctttggctttattatttgatttgggaggtagaaaagaaaaaaaatatcaaagctcataaataaagtcttgtaaaacatcgcaacaacttcctaggtcacaagcaaatactcttgctttcagataagattatgtggaatgcaaaagaattagagatcatggttcctagatggctattacagtgtgggtttgaatctttaagtcaatagtggatagcaaatatatctgccatccttgagacagacctgctaaagacagattgatttctgtgttcctatgtatatcacgtggcactatctctagcactgtatgcccaaggacagagctagagaaataatttccatgggaatgaaatgatgagacaatcagaacttggactcactcccagttcttcagaagtaaagttaattaatctggaagttcatcacttccgtctaagaaattcaagagaagcacaattagttcagcaattagctttaagctttcagaaacatttttcaaaacggtggcaacatctatttaaaactggattattgcaatgagtattgacatatttcctattgatatgttctcaaaggagcaaaaattcatattgattctttctgtacagtaaggctctattttatgggcatcctcaactgagatttcctttttgttcttaatgagaatgagcaggaagcaaggtctgccatctggaatagacttggataaaccatgttctactggaaggtctttcctcataaatctctgctgttctttccctacagcttcacctgtatatatatgtatgcacctatgtgtgatcatatatgtgtgcatatgtttgatcatctgtacatgtgtatgtgatcacgcacctgtgataatgtgtgcatgtgtgtgattgtatgagatcatgtatgcatgtgtgtgaccatgtgtgttcttgtgagtgtgagtgtgtgtgtgtatgtgtgtgtatgtgtacgtgtgtcaccatgtgcatccagatgagtgtgaagacttgacagtgaaaaagaagacgttggatatcttcttctatcactctgccagtcccctgttttgatacagggtctccactgacgctggagttcactgatttaccagactagaagccaaaggactccaggaatcctttatccctgagactttcctgtgctgaggtttcaagctcaggtcctgatgcttgcatgatcagtcacctctccagtctcaacatgcatatttaataatggctttccaaaataagttgaataaatgtagtttaggtaatggatcttagtctaaatttagagttctgctgtttttctaaactagaaaatgtcaactatcttatagggtcaaatctgacttcatgttattgatgcaagttaaaaatcagcaggcaaagttcagccagattaattaatgagtttcaaaactgcctttaagttgtcatatttaatcctacccaaattaaaaataatcatagtgtttttcagatttaatagtatcgtttaaaatgcactatacttttaatgataagctaataataaactaaacagcttttgaatcatttttgcaggttgctaaaatagaaatatatccataaggtagacaccattaatcacatgcatctgacaagctagctgtatttcaacatctatacacatagttccactgaatgtgaggtggccactgctgcaaaaaataatttccacaatatggtaagatgtgctttaagggttttttgttatatatgtacacattttaaggaaatattgctctgaaccttgtttacagatcttgctagatatttatcaatagtagtcaaattgattatgtattatcttttaaaagtatgcctctactgctgtgatgaaacaccattgccaaaaaacagcttggagaagaaggattatttcgctttcctatcttgaaccatagtccatcaaggaaagccaaagcaggagctaaaactgagcaggagctgacgcagagatgatggaggagttctctttacaggcccttagtcagctttatggtaaagcccagggctaccagccaacagattgttgaccacagtgggatgggccctctagcaccaatcactaatcaggaagatgaaaatacaagcttgtcagcctacaacctgatattctggaggcacttctttaaactggggttcctgtttctctgttgaccctagcttgtgtcaagtcaacaataaactagccaggacagtgtaagacttaacccagaaaacatggtttgccattaagtgggaccctttctagacccatacaattcctaatcagcttactgacttgtgtgtttcagtgatatgggacagagcaggaacataccagtaaagcacaaatttatagtttcatcaaaacttctttttatataatatgtttggcatagaatgattaattaaaattatgttagtcacaaagttattactattttgagttattattttcaaatgtgttaccagtatatactaattatctatggtactgtttcagtgtgacacatttgtacaaacacatgatgtgtcttgatcatattcatatacccctgttattcagtcttgttacctttcaattttccatattctattcactatgtgaaaaatgaacccatatttccatgttatgttaacctaatcttcttttctaaatgaatagaaaattgagtcactaaaaacatgaaaacaggcagtgtcaaatttaatgctgagggtcagttgactctaacagatatactagcagaataccagccacttgtcccatacttactgagtccctcctatgtagcaaatgtccatagagctgttacatgttaaaaaatatatatagataattaaaaatttacactaggttttaacaaaacactcttcagactttacattctatccttagaatgattgagacattcactgtaattgcatacatataaagcatatatcccataggatataaacatatattattctttggatatgctcaataaaacaactttgttcagtagtatttatataatattatttgaaattggcattttaatttaaagaaagttggcagaatgtaaaaataaatattagaatttactaacgtatatcatcaaacatacagatatatcaagagaaaataatcaaacgcctctcctcacttccccgctccccttctcctcagagaagggaatcttcacaaggataccatcctgccctggactgtcaaatcactgcatggataagcacatcttctcccactgaggctcaaccaggcaggccagctatgggaaggggatccaacagcaagcaaccatcagagacagccctcactccaattgttaggggactcacatgacgaccaagcactatatgtagaggagctaggtccagcccctgcctgctctggggttggtggttcagtctctgtgagccaccatggcctcatattaattaattctcttggtcttcttgtagtgtccttggcctcacttgctccctcaatcctatcccctactattccataattgtcctcaagcttgacctgtggctgtgggtctctgcatcagtttccatcagttgctggataaaagctcccaggagacagtaatgctaggctcctgtctgcaagcatggcagagtgtcatgaatagtgacaggggttggctctctcccatgggatgggtctcatgttgggccagtcattggttgtctgttccctcaaactctgctccatctttctcctggaaaatcttgcatgcaagacaaattttgggtagaaagtattgtgggtgggttgatgtcccccccaacctctacttgaaatcctgcctggctacgggagttggctgcttcagtctccatattcctagctgattaaagtctgctttcttatagaacccagaaacaacagcccagggaaagtccccttccacaatgaccagggcagtctcccatctatcatttaattaagaaagtgctctatagatttgcctacaggctccacagcctattttatggatatttttctcaattgaggctccctcttctagagatgacttgagcttgtgtcatattgacataaaaccaaccaacacacctagggatatagtgccataggtttacatgcatctagtatgaagccctgggtgtcatctctagtgccaagtagtcctcttgtggtggtggcttcatgcttctaatcccagcactttagtatgggcaaaagagtcaagtccataaccattatcatccatacaagaatctttgagaataaggtgggatccatgagacattctattgagtgaacagattaatctctgccaagcttcctgtgttgcaccagagcccaccaagaagcacaaaggatacttcaaatacacagtctatttgaattactcaagtcctattttgtatcatgaaggaatgcaaattgtaaccccttgcatatttttccccataatttgcatccagttctcaatggaggtccttggcactgtgtgtggcacctcagcgttctagaggccctcttctgtggagaagcctggccatccttgtctctgctgtcttctgggtccttgtaattctcactctgatcttaatctcttgacatttccttgcttactctttcttcttatctcacataaccacctctccctgctcattcacatctaaagcagcttcagttttctctggatgatgaggaagtcataggggaagcctgaaagtaaactggcctggcattgatattctttatataacattttactcacatatataatagtaaacaaaacaatgttaggtaattttttaactctacaatatttcaaaattctgttttagggagctgaaggtgtagcttccttgcttagaatgctcacaagttcaattgctactatcatcagtacaacaaaacttctattttaatgacatttctggataacacattctgtcagtgatgacacaaccagaatgctgtagttgatacaaatatctctgacaacaactgttaaggattctcttccaggtctatcacaggtaacacataagtgcatgaacttcttcaagtctcaggatatttttatatcaacaaaatagaaataactgctgttttctgaggggagatgtcgggggtggatctgagggagaggaaaactgagtgggaaactgagaggaaaggaggtagcaaaactgtgtttgacatgcaggagaaaagacatgataataataataataaataataataataatactgactcaaagaattgtaagtagcagggacactgtctaagcaaaatttcttagctttgaactatattagagacctctgtatcattagttatacatctggcagatcaaagaaagtcccaccagaaagactcattttcaccttaagacctaaaaacctcacttagctctggcccacagattagggataattactatgttcaacaaattagaattgggtctagatattttaaaattctagtttgtctacaacttcttcctacagactaatatgtctgtgtctatctgtctgtctgtttgtctgtctgtctgtctttctctttctctctctgtctctctgtctctttgtctctctctctctctctgtgtgtgtgtgtgtgtgtgtgtgtgtgtgtgtgtgtgtcacatttgtagaatctgagggtagaagagatgttgtatcccctggaaccagtgttgcaggaatctgtgagctatctgacatctgataggtacaatcaactgagctcaggtcctatggaacaacagcaagtacccttagcccgagcctccctcacccacaagttctgctttgagctattagtacagatgtagcttcaagtctggttaagttccatttgtatgtggaatttattaaattccacttttaatttgcttggctcataagtatttgctgctcaactgatccatcaccattataggtgatttattttcttcattctaaaaatggtaaaagatatcatgtatattccttcttaattaggttggaccctggtgaaaacaaacactaagtcaatgcctaatggtgtgaatctgagaggaaagtgcagttagtgatcatgggctctggacctgtttgaggaacactccactatctctgctttatgagagaagctaatgggggtggggtgaaggcagtataatgttctcactccattaaatcctgactttcattcttttttttttccttgctaaatatcaaaagagaaatatggtccacttaactagaaaaagaagttttcatttgagtcaagtagaaacatgatgcattttcctctctaatttaatttctaaccattaagactcaattctataaatgacccagcaaagcatttggagattagaacagtctaaactgaatatcctttgaagttggctggctagacatcatgatgttatgctatgtaattagaacttaacatcacacttcatgagaccccccaagccaaagcccagagactgacatgactgtttatgaagtcccttcaatggattgttgactcaatctcttttctagtctttgttaagcatcatgttggccaagccttgtagtgatttgaacttttgtttaagcagtccattttactatcataattatagaaaaaggttacattctgtctgtgggctaagggaaaaaagattatagctctaatgagccaaatctgtacaaatgggaaaataacaatctcttcataattagaacagccctttagactaagtattggccatgagtttttcaacagaaaaaaaaaataatttcattatttagttaaaacaatatatgtaaattaatgccaaattgcttactgggaagggagaattaaaatcctttggcttgttttcataaatatttttattgctgaaaatatatcctgactttctagtcaaaacaatgactattcttttctaggtagtttacatagcagaaactactacattatctccatatgtcttatggtggtttgcatatgcttggcccagggaatggcactattaggaggtgtggccctgttggagtaggtgtgtcactgtgggtgtgggcttaagacccttaacctagatgcctggaaggcagtcttccactagagccttcagaagatgtagaactctcagctctgcctgtaccatgcctgcctagatgttgccatgctcccaccttgatgataatggactgaacctttgaacctgtaagccagcctcaattaaatgttgtccttataagagttgccttggtcatggtgcctgttcacagcagttaagctctaagacaggtggcaagtgatgttgatgatctaaagcaagcagtttctttgtgatgataccataaccctatttgaagcaagtctagcaaagactcagatccagggagatgaaatgcatcccatggaactctgtgttgtacgcatggcacagtcactagaatgttgaaatatgagaagctctcattacccatgctgacacacaagtaagctctggatttctcagactctcacctgagcttcttggcagccagctcctgtgtgatccaggggtatgctagagtataaaggaagtggaaggtccagatggcagtgataatagctatcgtgagttttctccaatgttctgggggagaggctcttaggttatacatgggcaaatcacctgtgctatatctaatcttattacacccattggttcagaaggtaaatttggacagattgatttcttcgtttatttgtgtgttatgttttggttttggtttggtctgtttgttctattcattgacctatatggactgaggaaaactatcacaaaaaggacttgcttgaggtttgagtggactcttgaattgggattagaattcaagaaagttgttgactcccaccaacagtaaaggcatcaaccagtacaatcctgagagaacatggatagtatgaggaatttcaaacccagagggaaaacactgaaggcagagatgtgagcccccttagggaatactgaggaaggcacagcacagcagaaagggtatctaaatatggggctactggcagataggtaggttctagaataaagcaatcaaagaagagcagccttagggggaatgcacttgaagtccagggtactggctggttttgtgtgtcaacttgacacaaggtggagttatcacagagaaaggatcctcccttgaggaaatgcctccattagatccagctctaaagcattttctcaattagtgatcaaggcagggagggcccattgtgggtagtgccatccctggcctggtggttctaagttctataaaaaagcaagctaagcaagccaggggaagcaacccagtaagcagcattcctccatggcctctgtatcagctcctgcttcctgacttgtgtgagttccagtcctgacttccttaatgataaacagcaatgtggaagtgtaagctgagtaaactctttcctcctcaacttgcttcttggtcatgatgttctttgtaagaatacagaacctgaccaatacacacaggggtagtctgtgacttgaagtcctattaccaaatttgtatggaaatgcctgacaaactaccacaaatgactggggcagtgtgggaggctcagattattctccatacttttgcctagtccacagtgactatatggtgttggcaagatcaggagtctgcttagtatgtggtattgacttgtgccacctgtttatgggcctctagatgaaaagtaattgaggattgatcttatgctcagccacattatgaaaatcaacacaaaaacataacaaaagcctttcccagccctgctcttgctgttttacatggtcagcaacaggcatgactcataatgtcaagtatgcccaggaaatgtaataatgtataagcttgcctggcaaagactttagcaatgccaattgtagactctggggttaataaaatacattattgcatggattttttttattattcatcctacagctgttcctgagagatgatctgctatcagagttcagtgatgagaccacagattaaaaaagaaagaggaaaaaaaaaacttcactcatttaactactagttgttccccttgtaacacttcaagtcatcataaaatttataaaacatattaaacaaactatcatgttttccaagaaaaattaacaatcagaagaccattggaaaatctgcagattattccacacaagtggggctaaggccattagtattttatagtatactaatagcactgtggtgtgcaagtcttaaaatttgcaatcatgggctcagtgaattttaaattactacaaaaacttaattatcttcccagaagtcatcaccaaacctatccaataaaagagtgaataattttactgttcagagagtctaaacaacaactgtcattatctttcctggtagaatttcttctcttccatctacgaagatttgttggattcattctgtgtgtaagtcatgtacatagactgagtctttgtctagttcatttcacacttcaacaatgagctataaaccaaggtctaactatggtgagaatctcagctgttgaaataaaatcaaggtacagaaaatatgtaaggaccaataatgagtcttacacctcaccatgctctagaaataagtatttggtttctttcttttcttcctgttgaaccagaccaaatattaacattaaagctctctgcccttccaaaggtgcagcctaaataggtaaatatgccttgggactttgtcatttatggaatgatttacaaaaattaaggtatgtcaaatctatagaaggctttcattcaagaaaagattatacagaacaattcacatgtaaattaggacaaatttggcttggatctttctgttgtatggtgatgtatatttcttcccaccatgattgaagcattccatcctctgacatactttcttaaacagaaaagcaaacacttaaaatagcttaaggacgtttctgaaactaactagattcactaggcccctccttgccaacatgagctataaaagctgagtgtccatctgtgacagaccaagatgcaaagaagactctaataccagacctatatctagaagaagtttagaccagaatcacctggaaaaggcattctcaaaaccagtagttgactgcaggctgtaaagtgtgctctaggtttctagcttttgtgagctaccacccatgctgtggcggggctttagtgacatagatgtctgttgagtcatttctgctactgtaagtaaccactcatttatagtcctcaaagtaatctcaaaaagactcattgggtcaccaagtcacactttagtgctttccatactttggtccatcgtgggttcatacctgggatgagtagacatgtaagtagtatcttgctaggaaaaggtttgtcacacaacacatggatatataagaatgaaaggaaatagtagtttgcacaagtaaattcagaaatttcagatggattgtactgacattagtgactgagtgtgggtgagagaaggaggtaaagggagatggtcttgggtagctgatgagtggggagttttccctacgaaccatagcctgaaaaagtactttggtgagttaaaatgtttgtctattttgctcttttgattaatttagtatatatagaaaagagaaaggaaacattttcttcacctgaaaatttgtttatttgagtctgtaaataagctgacaacaaacagatgaatagaatcagagacatttaaatgtattacggtgtaaaaatatgacatatatacaaagtatgaaacagacagaaaagccagatggttgaattctaaaaaccaagcaggttgtgtgccattttagagcaagagaaaatgatttttatgggagatgattgggctcaaaatacacaaacaacctggattacatttgcctgggctctggtatgatgtcaacactagttatttttccagatctaatatacaggatctggtcttcctacaaataggaggcttcaaagaaagtaactcttatccacggaaggaagaatgaacagtgaggagaaggaaggccagacctcgcctcactcctctttactcagagttcagcgtgctaaatattacacactgaccttatttttctgattcccagaagaacagtactagtgtttcctcagtttttgcagaaaggggaaaatagggagacaatgggctccatatactgttgcatggctagatcattatgaaagaaaatatcatgtattataaatattcaaaatattgaaaatcataagaaatctctttatcagaaatgttaactctgttttaaaatgacaacacaaccctcatattggcattgaataagagatttagatcagatcatagcagatgtccctgagagggaaacacataacatgaacttaatgaaactagctggaatttttctcaatggatcaagaaactgacacatttctacaaaatactatcaacactaagcacaactcaaaaataggctgaatcatactttcatatctctaaaactagtattgatgagtaaacaaaaaaagctttaaaaggtcaagactcgcttaaccttaacatatattcgggattttcatggcagccatatataagttctgaaaagtaattactctgtcctagagaacttttataatcaaaaccttgaattgccagtattaagaagctaaaagaatatagatattaaaataaaattgttgtgaggttatagtcaagttttggtgcatccttctttatacagatatgtgacagtaggaagtgatgggatgtctttgacgaaagttttcagaatttcacatctagttgattgtcttttgatttcaactcttcttttgggtccttgttgctaacatgaatatgctgggtttttttgttttgttttgttggggtttttgttttgttttgacagcaacaacagtagcaataccaactaacagattttgtataaagttctgaaactggtacattttaaagtgaaattgtcctaaaagctcaagaaagcagcttattatttctggaagtccttgagattggggacagagcacataaccagaatgacacatgatgtacaccaggttagccagcatcattcttgggggctttatggtaatgaaaaggcaaggaacaatagataaatttggttcctttcttgtctgttacaagaatgaagcagcataggaatacatgaaatatggtcaaatttagtttgggtatcaagcaatatcctttcctatctctaacagttaagtagaggtaagcaataagtataatattagagataattagataatagatagatagatagatagatagatagatagatagatagatagatagatagataggtggacagtaagttacagtacccaaagaatgataaccaagtttatccatatatacacttttatatacacatttaattgtccttgaactccacatacatgcactctcccttcacatatgtacaacttgtatatgaaccccatacagatacatacaatcccccaagttccttctccaaattataatgtatagagacttagaatatataatagagaacgttctctatttgcaaggatagttgtattatctgctcaaaaattcaatgaaaatttctactgaacatacaaataatattttcccaacccattgcttcattctggccaatgaatgttacttttttagtgtctactagcaatgtggatacattgtaaccagtctgtctccttctcagaggtagagatttgaaatataaacagcaaacaatattttttgtgcactccgagaacacatatatgtctaaattataatcacagtgaaacaaagaaaactgtggacttccacttcatccctagccatggataaagataaaactagcagtgtaggatgctgatgtaagatatccatgctgccattgatgctgatgccatggatgcatttgaaagtggtggtgtagcatttctatcagtgttagtttatccaggtctttgaaacctgaaaggtttctagatttttttcaggttcgcagttctgttgcttttgtcactttttttttttttgacttttttttaattaggtattttcttattttacattcccaatgctacccaaaaagtcccccataccctcccacccccactcccctacccacccactctcacttcttggccctggcgttcccctgtactggggcacataaagtttgcaagaccaatgggcctctcttcctaatgatggctgactaggccatcttctgcctcatatgcagctagagacacgagctccggggatactggttagttcatattgttgttccaccaatagggttgtagacccctttacctccattggtactttctctagctcctccattgggggccctgtgttccatccaatagatgactgtgagcatccacttctgtgtttgccaggcaccgtcatagcctcacaagagacagctatatcagggtcctttcagcaaaatattgctagtgtatgcaatggtgtctgcgtttggtgggtgattatggaatggatccccaggtgcggcagtctctagatggtccatcctttcgtctcaggtccaaactttgtctctgtaactccttccatgggtgttttgttctaagaagggtcaaagtgacctttggtcttcgttcttcttgagtttcatgtgttttgcaacttgtatcttgggtattctaagtttctcggctaatatccacttatcagtgagtacatatcatgtgagttcttttgtgattgggttacctcactcaggatgatgattttttataaggaagaatgaggtgagccttgtgaggcagttcatgagatttctctgaggcattttgtctgcaaattgaagctaaatgcaagaaaatgaggttgcttcaaggaattccagcgatcccctcaccacctagatatcattcatgaaacatctctcattccatttggcaaggtctgccatgccctgttcataaaagaagttctaacccgtattagctttttcaaacattctagatccctgggtgagaggacacacatgttaaaatgaaagtaatatgctttcaacctttcctgtgttggagaaaagaaacttgtctgtcactcaggacagttatattttggagtctatgaagaagagcaatggagggcaggcaaagagaaacaatgaattgatcatgtgcctacatctttaggtgttgattctatgagagaaaagccagatgcctgaattttttcttcatttgaatcatggcttggggctctggggaaaggtggcagtaagcagtggaatggaggaaaggagggagatgaacatatatcttctcattgtgtaggttaagcttcattaaggtaaagttatatctaggagggctgaccaggccactgacaaattctgttgccacttactgtatctcctatagtttagtagacttttctgtggctgagaagtcccagaaggaggagactcagaacatttggggttctctatggataatatctctgttgatagataagggaaagtcagagaaagtcccttgtgacagtggggagaaggatagggagtgagtagagaagaaagggtgggagaagccagggcagggcatctgtgagccccttgcagttcttttgttcagagcactcagtactttgggctctctttctgatcaccagtacttgcttcatttccaagtgcttactgtgcgtcacgttatttctgaagacttcatcatttcactttatctatcagttagacaacttttgttcatggcaactcaaagtttggaggaatccagccaacaagtaaatattagagaatagttaattcagtcattatatatggggtttaccaatataaaattcaccaatataaatacaggctgtttttacctcttattcaatacttggtagactcaatcatatagtgatctagttttcttggtatattttttccagatttgaatcttccactggtctccattcttttcactatgataaatacaatatagtgttccattactagtttgttagtacttaactttgatgatcagttttatcaaaattgacaggtaataaaaaacatcaatcctttactatactatttaaatacatcatgaaggcattcacatgttttatgagaaaacacttttcataaagaacttttatttgtatttccttaattatataaatttgcattataatgaaactttctaacaagttatccctgcaatggcgagggtcaatcctgccattcagtgtcttatagaaggatgaacatatcttaactttggacctgcatatgaattctctgggatttgcctaaattcagatactcttttaattctctagtttgcagtcactataacttcccatccatgcatctctccactaggaaatgggaaacagttcacagagcccacacgttactctgctcaagcattttgtgctcatttgccttatcattgcttctatgcagcctcattccaccctgtaagaagtcctctaaatcgggtcctcaaaactattctgttatttcttgaacctttaaaaccaaaccacttgtttagctgctgctatagtgtttgtgtctcatcgaagcacaaattatattttccccaggtaacagacaagtatatatagtttgtcatccttattaggaaggttatagaataggtttggaaactgactagtgtcatttccttcaaagcatccttcatcttcagtcaaacaaatgttctcacatttagtcatttacatattattttgtcactacatatataattatgtgcttgcaatacatcgacctttcccgacctccatatttagaattcccgcagatcccatactgtagaggcagaaagttctactgtctctcgcccatcacaagagtcatggtcataacactaaacaaaacacaggttaacaagaacagagtataggtaaatggatactattgtagttttgcaggatgtaagtgccttctgaaatgtaaaacctgtgacccaaagagaaatacctggttttatgctcaggtttatggaaaaaatagacaactagatagaaatatgttggacagggaaaagcaccaattattggtatccagctgtggtggttaattgttattgcaagcttgaagcaatctgcaattacctgggaagcctcaataacatattttccagtgaagtggtatggcctctctctctctctctctctctctctctctctctctctctctctctctctctaacaatatgttttaaagaagagaaatctagcaaagtacttagtgtgcatggatttggttttgttcagttttaattttgttgatatattttaagacaagatctcactgtatagacaaggatgttatagaattcacagaaatcccatgcatcggccttccaagggctgggattaaagggctgtgccaccatacctggatctttctgctctgagctgcagatgtaaaatcactagctgcatcatgtccctgccttgagttccatgctatgatgtaacttggccttaaattgtgatgttaaataccctctttctcccgtgtgttgccttttgtcaggttttgggttgttttgtttgtttgtttgtttgtttgttttgagaaatacaattaagacaccagttgaccagggggatcccaacaagctggtcttcatacttcttagcttctctatgcagaatccctccctcctaggtatagacagctttttctggagcaagagtcttatggtatactaattgatgaagtagttcgcaggatctctttatggccagctgtttgccaaaagacaggagaaaaccagggtagcatttctagattctactggctttaaagaaggattctagttcctgtgatctgtctagggacagaaatgagggcaaaataaaaacttgtaggttggaaatagattggttctaagtcttttccaaactccttcattttagtgttctcagaataccaaagtgttaaactgtagggcatccttttctatttccttgtagtatacttaaccctgtttcctaaatcacactcccacatagttatcaccctcttgcattcactacttttgttcatttatttattgtatgagttctcttgcaagtttatatttccttactaggttggtcagttgtaatgtttatcgtagtatccttattcttgtaccagaagcaattcctgtcccagagtatgttcctagtaaattattttggggaaaaattactttgaagaatatttgacggtgtttgaaagtaactcatctcaaatatacttgattcatgaaaatattattagaataattttgaaggagcaacacttgagctagtgtagaaatttgaacacctatccaattacaaactcttccttttttaaagcctattcttagttcctttcacttagaggacttaggaaacaaactgtgacaactgcattgattgcaatctaggatgaaaggcactgagaatggcttccatatttgagctttgataatactgcaaactgcaaattccagatttgctgatttaacaaatactatattacttgttactggctgagtaactctgaaaatcaaattgaacctaaaaagagagagcaagaaaggcatttatttcataaacctttcccatttttttccttttgttgcttttattatggtcataaaaactttgcttttgagagttaaaagtcccctctgggatcatgtctacatggaaggttaaggtattaaacaattatatttttgtgcaagtaatctcagacaacaaatatacaagtttactggttaatttagaatccctgagtcagcattactatacacaggagttgataaccttctcttctatagagctatacggagcaagcatttctctgtgtctagacacatctctctgtcactggagctttattctaacagttcaaaatgagccagaggcaataggtaaatacataggtataactgtatcccagttgcactttgtttcttggcactgaattgaaatttcttataatgatcaatgtgtgaaaatcatccctgtaaatagagtttccttcagccattttcaacttatgctccacaaagtagatgaagggaaatccttggctaatagtcagtatatgtttcccactgtagatgcttctgtacaatactgctgttttcctgggctcttctagaggaataggaaaaaaatcagataccagtgaagtagatttggtaaatgtatgttaaattaaatgaaagtcttttgatgcagatgttattggtccaaggctgtcttttatctccagttaagatctgctggaaagcttatgatgtggttgcaatcctgttgttctcactctacaactttaacactaattaatgttggcttatctgtttttacactaagagacatctagaaaatgtcaattatcttttaatgtttcattggcatatatatgaacaaatggagagtcgagcttattattttctcttgtattccatgtgatttcaaatatgtgcacaataaactttcattgttttctctcaacttcctctcttgtctatttctactgaaaacctttccatcaaatctcctctcctgaatccatgtcttttctgtgtgtgtataatcactgagtttaataaggattgatgttatgaacaatttatcagtggttacttagctcccttcttccaggagccattaactgtcaggagctcctctggaagaagtaggacttcacctctcttgtctctgatgaaatagtgcaggctttaactctgtgaaattcttgtaaaggtaatcacagctgctgtaagctcctgagtcaacagctatgtcccgtacagaaaacaaaactttcacagcattgctgcctaacctaggaatctttcttataatatgctcagatttccatgatactctcagatctactgaggggggagtgttgatgtctggttttagggcaaatcactatagagtaatttactctctatctagtctgactcttgggactaagacattcctaggcaagggctcttgaccagtctatagtgctatgcatgtactccctgctatgtgcaaggccttccatcctattagaaggggttaattacctgtacagtggtcacaataatcccctaccctttatgctgtctagtgtttttattgtgtttcctccatcaaagcctatataatacaagagggaaaaataggtgattcatgaaaaacggtcacagtggtgctcagtttaatgatgctccattaagactaaaggaaactagctttagaaacgtctatttttagatacagtgcatagtggtataattagaatcatatagtccccattttataacaaatatttaagcaaatagtttatcacttatgtaatgtttaatacttttaatacagaaccattgtagataccagataatgtccttttccccctaaattatagtttgaaatagctatttatcttagctccaagaagtatttcccctgaaaatgacaaaagttgaaattctccaatgccatcatattcagacataaagttcctgtgagcatgttgtatgctattattccactttatttgtttctgcactagtaattcttttcattaacaggcaaaagggtcagttttccaacatgccaataacaaagacaagttaactagacaaaaagagatttatttaatttttaattttgtatgacattggaaactataggaatgaaaagtctaaatttagggaaagcaactactccatgtgtttagaactgatgaagagagtatagctgtgtaagtgtgattggttataatatatagtgatatcggtcgaattaagagggagttcagctaggcatagctgctcattttcacagactttctgaatgatccttcttttttcttccaatatggagcaggaccattttggatgactgtcctccagaaaggagaagagagggaatggtgttccttgggttcctggcatgttttggggaggaagaatttcattttcagtgatccaccttagagagcaggaattctgtgctcaattattcatgtcagtgatcaggggttgggggaggtcagagaatggaaaatctaagagaaactctgaggcttttcagtgtcttatgtttcagtgaatgccaagggttgctattgtattctgagccctgacatctgggaatgatgcagtttgcacccatttgtccaagagaaccactgttgccaagtaagcccaccagacatcaacacacagacactcttaaaggtgaaaagaaagtcattattgccagctactggctgcactaggaacctgcccaaatcatgcaaccctgatggtcccagccccccccccctctttctttctctccttcctgcctccctccttcctctctctctctctctctctctctctctctctctctctctctctctctctctctctttcttccactaaaactacatccgggttgtaatacttcctttaaccagaaacagaattctagaagccaaatgcaaggttagttgattcagggacctttgtagaactataaaataggtctttgctagattaggtctttgttcccattttgataagtgttgaagcctatgtgctggcttttagcttcagttgtgctaaagaccaggggtcactttcaccatctagcttctatactggaagccttttgtattgttattagagaaacaagaccacattcatttgggggggggggggagtcgggtttgttcttttggaaagatatctcctaagtcattgataatgtactttcaatgggcaaattttttctttgtcatttaatgtgtgaaatgagtctgtttaacccactttatatcacaaaggattaagatctcttgttgtaattgaagatttgaaaatatgttttcatctaaatgcattagcattgagcatccccttcccactcagtacctccgtgtttcctgtttgaaatgccaattaagtggtttcactgttgattggttagaagcctatgcaacttctgggcttcaggccattaacaccctggccagaactgctgacagaaagatgaagagatttacaccctctgatttctgtattaacaacaagaacaaaacagtatgtggtcttgtaggtggataatacaatttaaagatatgatttcttttccacaggtgcatttatctctgaaaattagcagttcagcttggtgtgagaaatgagtcatcgtctccaataggtttgaatcattaatcaacctgttatggacatgctcaagatttacacacctaatactgtttctttaaattaggagagaacggaggtcagcttatttttagatataagttctgattaaacttgctttcaaaaagaaaactaaaaagggaacaaatgaaacttttgttcattctttcagtcacttaacctcaaattacttttcaaaaactacaaatgcactatgattagaatatgacgttcccagtggattccctaatgactttgatagctgaacatatatcttggaaggaatatacgtgatgtaaatacgtgtaagagaacacagacaccagtagacatgctaactcagacgtggtaaagctctttaagcctcaactctactcaaagatctaccattacctaagaaatgctgagagcagaggaaatagtcttcgcaaaggagtagcacaccaattcattgtccaactagtcattgctagaaatgtgattgcaggacaaaatggttggaggaaaaatgtagataaaaatcaacattttggtaaacgatgagccaatcaccactgagcccctgctaactgtccaggtggtaggcaagattaaggaaagaacataatagctaaagttttctcaccttcaatgaatttatgaaattattttggaaagatatacagatactgatattaacactatagttaccatgattgatacatattatattattaatgaagccctatatttcagaatcaagaaagatcaccgcaaaacatgaaggttatattacatatcttgtttaaaaagtgtatgtccttaccaaattccacatgttctaaagtattacaggttataaagcccaaactttaataataacattttttgtaagttgagaccacgataaaatatactatagtaaataaataaaataataatttttttttaaaaagaccatcaatacaactaaaggatgaagcaaaacaagcagactattttgagtctccttccctcacggtcctctgtttaaacgggtcaaaaatacataattactccttagagtaacaataattttcagaagagtatcttcgatactcaaaagagtttctttgctgtttcagacactgtgaattttctcagaaatacagagcaaactatcctttgcttgagaaagtggaattgcaaactgagagacagagactgaaagagagtatggcagccagtacagtaagtgtgctggctcagcttgatgcaagctgtagtcctttgagaggagggaaccacaactgagaaaaaggtctctgtaagatcaagacgtaggcaagcatgtagaccattttcttaattagtgattaatgtgtgaggactcagcccattgtgggtgctgccacccctgggcaagttagtggtacagggttctacaagaaagtaggctgagcaagccatgaagaacaaacagtaaggcatcctccacccctccccaacctgctttttgtcatgttactttgacacagcaataggaaccctaactaagacaatgagtatttagcaagtaccaattgatgcaaacactagtaagttccgaggtatcagaaacaaaagaaaatatttgctctgtggttaggatgattttaattcagatatattggctgtttcctcagaaagtacttgtcgatttcctatgacatactagaacttgcagactaatattttccaatccttacaaacccctgtgcttatgtgattgaaaatggaaagtattctagttgagaggcagaagcagagtaacacaatgatggccaggtagatgggagaacatgtggcactgttcaagagtagggcatgcttgtttatagggtgataaggactgaaacatttcaaaatccaataaaaaataagcaattgtgtatatatcacataaaattaaggaaatgaatgagatattcagagtatattggagtcctcaaatatgaacttatcatctggtattaagacttttgcaaatatgctggtaaaaagttaccttaagttgtatttctcaagtcactcaacatgttttcatattatggattctgttgtcattgtaacagatagttctcgatataatactcagttcactagcaaaactctcccaaaggaaatgcgaagattacaataaattatcactatgtgtctcagatgtcactctggtgtagaactctataaatcgttctaaaggctctcaagtcctcagactctgaggccaagaaaagagctggcttccaatggagcaaattttactgaaagtgaatttaaataacttggcagaaattggcataaataaaacagctttgaacctagatgattgatgtctttgttgaaaacttaagatattaaaataacaataatttagctactccatgaaggctaatgtcctctctgaagagtaaattaatcacagaaagctactataaaatattgtgaagtcacaataaatgacagttaattattcatgatttcgttcaatggtatagttatttatgttagcttgagtttttcagtgttttgcatctctgagctctttattgactccttcctgttcgtaagactccagaccaaatcttaggttctagccttgtgatcttatgattgagtttctgccaaaattccgcagcccacttctgttctctcttagaagcagcagagaaatataactaacttcctggatagatgtggccacattccatcaatctccacacaccagtgtcatatggcacagctgggtttaggacaatgaactcagagctgagagggtgtcgtacaggacgatttactgtcttccaacttcctgacactcctttactttcaaatggtttctgagagctaagaaagacagtaaatgccatgagtgtaaaacagccattatgggacagacagaggctgatcctgagcgcttcctgattaaactgttggaagtcaacaaggtgtcatgctttggtatctgtatctgtattcagagatccatgcatgcccacccccacagtaatgcaaatggagtacaagtgaacacgcacacaactccccacatacaacccctcccccatacacacaagcaggccctaaacagaattattttagtgttcactgtagttgggaaaacacaaaacatgcaaatgaattttactagtgtcaggtttcccctggtggatccttccagataaaattctcatttacagatttattaaagtatagaatttagattattgtttgtactctggcttttgcttcacttttcataagattggttttgtgatgtgggaaaaagatagcaaaattataagagaaaaaatgtagttttaattttgatgtctgtgatgtgtgtcttaggtattatcaaattaactataacaaattaatatattaagataaatgctttggactgacactactctctctgctacctgcttacactgaaaatatgtcccattgaggttgctcaataatttgactctgtctacaaattctgaatagaactcaggtatttgctttgctaaaacaaacaaacaaacaaacagaaacaaacacccccccaaaacaaattaaaacaaaacaaaacacaaaaacatatggagttgatggtcttactaaaccaacttagagggaaactgttgccaggaaataatagtggagatactgtcattcaaagagtgtaccttatattttctgattttatatagtacctatgatagtctcagtcacttttgatcacaatcccaatttaaaaaatttaatttttcttatgccctccctacttcctcccaaattttgatctcttttcatatatatatgagttcgtttaatgttgatctttatatgtgcttaagatgaccatttggagccggacgtggtggcgcacgcctttaatcccagcacttgggaggcagaggcaggcagatttctgagttcgaggccagcctggtctacaaagtgagttccaggacagccagagctacacagagagaccctgtctcgaaaaaaaaaaaaaaaaaaaaaaaaaggccatttggggttggataatctatcataggattatccctgaagaagactgattctcccccactcagaagctatgactctcctattatcctgcatctagtactggaatatcatgggattctccccatccatgatgacctttcaactggtgtaattatacaagttttatttaggcgacaagtttgttgggattttattataacagaatctctgtcgtatatagaagtcattatctcttagcagataagacgctcttttgactcttccaaatgttccaccttgacttacttccatgatgttccctgaagtatcaggtgtaaagttactttgtaggtataccatgtgaggttggcaaccccactgtctatctgcgtctgcattttaaccaatccagaatttctgtaaccatctccatatgttccaaaaggttcttaaatgaggtgtgagagccacgctcatctgtacacattaggatacatatttagagtgcaattagaaattatacagctttaggtaagtggcagtagaaggctctcctctagggttcatgaccttcccagccatggtagtgtgctaggtttagagtaacacaatccctacatgatttaaaaaccccaattgagtggcttttaagactaatcatatagctgggatgctgttgtttggtggtagaaactcaattaagatttagaaatcttcacagtgcagattattgtacagatgatcatgggaactaataacaaacttggtgataggttcttcatcttatatgctttctcattgttggagctttgtaatttttttcactctaaaacattccacatgtcatttcttccttctcatcccagaatgcccaatttaggattatgattgtcttctcagcagtgacagcatggctgtataactagtaagaggtaacacatgccatataacattacatgaatgtagcttgatggactgtaaatccctaattatgtgataaataatatagaaatcattcaatatgtattctgtttctatgtccacttaggaaataatacaaagacacagagcacacaacttctactattatgaaatatttcagtaaaggaaacagtacaatcttggtgaaaatcaagaacgttacagagctctgtaatatagtaaaaaccacagcaaagcaacatacacacacacacacacacacacatctcactctgcttcttcataatttattgaattttttacatatcaaattttgcatacttcttagagttagggtttttgcaattctgtttctctgtctagaatatcctcatagatcttgaatatgcctatttatttatgaagaccctgtttgcagtttacaaagttgagtgtttgtttctaagtattgctttaccaaaaacatctctaatgataattctgcaataggttcctcatgtatttccttttattatcaagaaaggcatgtgtgatgatacaaaaggcaccatttgatgagatggacaaagacaaacctagttacaaatatacattctcttatgggccaaagaattcttgtttggtgtgcatttgatccataaaataaggaacatgaatcttgggaccataaacatctcagatttctgagttatttcagattttgatatatttacatatgttcaatgagaactcttaacattgtggcaaatatgaacacaaaatccagtcatgtatcatataaaacatgcttcatgcacatacttatgaggtatggtcatataaatgcttttaataattttattcaccaggccaggtgccatttatttgcatattgatatatgtcagtgtttgaaagttttatatacatatacacacacatacattttttagttggggaatgtcaaccctatatttttctgtctgtctgtctgactgcttattcaaggaaaggatttaccataagacattatcatatacatctctggaggttaagaactcccaagatctgcagttaacacattcaagaccaggaaagaatgtctttatatatgtttaaatataaggttaaggaagcatgaaaaagaataatatcagttctaatccaattctcagctcaaagtcaggaaaaaaatctagtggtctaactagggtaaggcagggatagaaaagaggttctgtgcctttccctgctaccatgcataggtctccaatgggctctaagagaaagacactcccttgtttaatttacattttagaatatcatcttcatattgaaacaccctgatcaccacaccaaatacttttgtttgcctgggagtcaaaggcttgccatgactcagaaacttagaaacactgattgaatgattaaatgaactaatgattggatgaaaaaaaaagcaagtgatctggaaatgcccgtgagttagtttaattagcattgcttaggtatccttggcaggttaacccggataaagtaaagacaaggtatttataataacgagaagtagaatgaagtgcaatgcaaatgttaagggctagcctttctgtaattgagatgatttgattgacgcattctgttatggaaacatacacagtcaatctccatgagcagtactcaatgggatataagcttggtagaaagttttggcttctggtttaattttaaaaaaaatcattactgttatttaccagccaatagcagcttttgtaatgagaattttaacttcaaagcagtgaattaaaacaacatttttgttcaaggctattgagaaaagcatcttctttaagacatcgataggttcatgaaggcttgtgaaagtttgcgctagataatctgattattggaatgcttttattatgtgctgtttcctactatactttttaaagataagttttattttaaaaaaaaacccacaaaattacataagtgtatttctttactgaaaaaaacaaacaaacaaagtttgtctggtatgctaatattcctgtaatcctagaaattgagaaactgaatgtggagagtcataaattgaagccagttggttagagactaagactctgcaaataactaaaacatttactgacttagttttcagttgttttcaaaaaaaatatataagtggatacagtgtaatttgtttaaccaattatcaataggataagttaatttttctctaattttatattgaacaaaatgcttttatatatttaatatttttatatacttattggtaaactcctagaagtatttctgtttaaattgctgtactggcaaattaattttccaagtggtatatcaatttatatacttactggcctagttttcattgtgaagattatatactaaatactatataaatgttgcttgtgtttactttttgatttataaagcttttctgcactaattttctttttaaagaatgcccaaagcatttctccatatcaaactgtcaaacatctaaccgatttgtataactcttatgaacttccctttggcttcatacatctatgaaggtaaatcacccgtgtaaaagtcatagatcaggtcagcatagctaatctgagagcgagctatcactctgcacggcttggtatttagcatcacttgtgagtaactctttctatgctaaactgaacataaagtaatggcaatcagtgttctgtatgatttcattttattttatgaaatatctatatcctggaaaacagcactgcataggttggaggatgaggtggaaaaatgcttccatatttaatcttgcgctgaaaatagatataatatagtaactcagatggatgaaaagagattcattaaaatgctactaggtgaacctccccagagctcccttgctatagacttaaggaaagagttagaagggcaatgcagaactcaggcttgtctgatagctgataataaaatcagaaggagaaggagcatttagcacacaggtgtagttcatgtctggtaactccctccagagcagagttggtgggtcctgatatccatctctggagtggctggcttctcttctataatagcttcataaaacctatcctttcagaaagagtgctctgtcctcattatgacggtggtaatacagagcattacagatgattatctagagtccaaactctgggtttgaaggtcaactaagggagaatctaatgaaaggtgagatttgaagtaacagcttcttcactctactttggtcgtgagaaaaatggagtctttccaaccaccacctgctttgtagtcatgtataccatcaatagtttcaatagataacattgtgtctctgggcggtggtggcacatgcctttaatcccagcacttggaaggcagaggcaggcggatttctgagttcaaggccagcctgatgtacagagtgaatttcaggacagccagggctaaacaggaaaaccctgtcttgaaaaaaacaataaaatgaaataaaataataaaataaaataaaataaaataaaatactgtgtcatctcccagagtgttatctgaaacaaatctagcaggtgacttccaaagaaagattttctgtcttttcttgactgtttctttggctttgggaaagagtttatttgtgcgagtaaattgtagagctagcataggaactgacaatgtctgtatatttttgtttctaatcttttcctttccactttgtatatactctgtacattgttcaactaaattgtccacatggcaaaattacatatataggacggtacctgaaacacagcaggcaggtttgctaggttaacaatgttagtctacattttctcacttgctattaaaccaatcacctcagagtctattgttttgcaaatatgaatgggaaggagggagggagggagagagaggacaggagtgaaagaaggacagagagagacagagagatagagaaacagaggagatggaaagacaccaagagaggagagaagcaagatctgcaaagcaggtggagaacaacctacaataaggagacatggaaagcagagacagagagcagaaacaaatcccatggagttacattattgctctttagtgctttgagaaaaaaaaaatgtacttagagaacatctctttggcttgcctcttttctcctcccttcagctaatttgatagttaagcaggggcaaagatggtccttcttagagcgaacttaaccttcaatctttaatttagagcaaacagagtatttatagctgctctcctctggcgactgcaaaacattaccacatcactcaatatttaaacccaaagtatatttccaacgaccaggtctgtcccccagttgataagtctctttatgaaatgaactttaattacttaataattagacttctattcaagaagatgtggattccgatagtctgccaaggaggctagagggcaaatcagaagaacatgccatttccagattagaatgtacaggaaggagcaggcttgttcctgctgtatacaggtgggtagctgagaaacctcctggattcagtgagccctgacatacataaacctggactgggaaatgctttattttcacattgactataaatccaaagtaatatagatttgaatgaagtaaagtgcctgcctgagctgttccaaatttttgactgtctggctctgatagaaggtttctctcagtctgggtggtgctgccggcatgggtggaaggctagggatagactattgttctccttattttaattctgagagcctaatacttccctacagatttagaagctttgcattcattgccatggtgattaaaaaaaaaaacccaaaaaacaaacaaatgaacaaaaaacctttctcctcttttgtagcattacaaaagaaaccctcaagaaaaaaaatgtttggtgctttggctgttaacatttctactgcccctggaaacaacttggttgtatctagcctctgaagacatatggctaaaagacattggctaaaagggaatagatgggtgggtcttgttctgggtacagtgacaagaaacagaggtgcatattttgcacaacagcgtagatctggcctccaggttcttccagcattcatcagtccctagatggaataccctgaccccaaccgaggtctccagcccaagaggctgggcttctctccccacagaggctcttccctatatatttcagacattttgttctctccactctcttcttctccttcttgtatctctctgcatatatgccctttctctttcccctgcctcttgatccccatggtgacatctctggtcttggtccttagggtcagtgaagtcactggagggcagctttccaataaacctacacttaatataatctaatctgccttgaactggctcatttctctggtggagaaattgcttatcagtttcccttgcccaggttggcctaaatgggatgaggctagccaggaaatatctgatcatgttttctagggactgtgatttgaaggaagatggggaaataccacctaaattataagctggtcctcaaagcaagcttgtaaatctaagataagaattttgcagttgcattagggattgtgtcctgattttcacacctacagtttgtttccatctgaaagggtgagtgttcagccgggcttccaatgtactagcctcagctctttagcactttgcctgaagaagccactcccttctcccacttaccctgctacctcccaccccaccacacatcattgcttttactcttcatggttgcaaaaatacatcacttacttcaaatggaatgagagggattattctggaacaattcatgtgaccacgtctgtcccgggaatacagattctgcttgtctcgatttccgtgttccaatgtggtagaggtttaatgacaattttgtgtgacacaacaacaaaagccataaatcaaggagctttttaaacacattgcagggagcagtagctataggagagctgggaagtctcagctcgggtgctatctgatgacagtcttggccttttctggaaggaaactagaatgttgttagaacactacaaaagcattgtgcctgttagccccaaggggactgggccagacactgcttatcaagggatggctactttgaagactaaagatcaattgggatcaggttttggatctgccatattccaacatctacactatcaataaatctttaattgtttgataagcattggccaaaggttcaatgtatagagcaactcttttccagaactttccttcaacacttcttcgtgtttagggcctttgatgttgatctaagccaactattaaattaatcacaccatataatttttcattcaacaagtatggatttgatgaagaatcggtatgccttgtgctgtttgtaagacaggataaacctaggaccgagtccttctgctcatagaatttgcagattagcctggaatataaaataaaccccacagttcttcagtgtcagtctgagtatgtggtacaaaggagactggagtataactggctatacctgggcagaggaatgaagtgaggatttattccctgaattgacattatcacctcccgaataatcaatggttatgttaatgagagctaaaaaagtaaacccttccttgtattggtggtaaatgcatcagtaaggaatctggtttatggatgtaaaacagaccttgtgcaacatttaacaaagtgcacatgcaaagaggctcttcgtgaatctttcaggtgataaagtattataaagcaataacagaaggatcttttatggaaatcagaataagtggcagacccagtcctccatgctaactttataatgggcctatatttctcgttgtcagtcctgtttactatgcagctgtaatagggattggtgctatcagtaatgtttcagatgctgaagcctaaacacttcagtctgtatatgtcacttataagaatgagaagtagctgtatttatttttctcaaggccaagaggatagaatagagcttctctatgtgggctatgtcttgactttcccatatgtaaaacgaactgtgcttttctttttatagcttcttcctaataggctttggtctgtgttaacacatggtagcactgcacatgtctaaagctgtgaggtgactgctgtgggaagcttcctccattccaggtgttcctagacaggaagctgttatagcatcctgggccaggctgggtgtgaaggtgggtgtcttgacaacatttccatttaggaaacaaccttctctcaaggataaagatagaagcccccctgaggtattccaaataggtttttgtgctattttgaacagtacagcactccagactgtagttagtttataaagaatttaattgagcacaaaatgtggatttgtctctccgtgtatgcagggagagttggttccaggactctgtagaaacaagaatctccagatgctgatagcttcacataagatgtcagttttgcaaaaatgcatcccatgatacaatacatcgtgtctagctgactcatcatttatataataatatgtagatactattgcatagttatgtgtgttagggaatatgacacaaaagtctgcacatgtttggcacagatacaattaaaatattttcaatcatcagttgttgaagcctaacgaatagaatattaacagtcatctatactggtttgactaaatttcttacccagttctacattgatactggaagagcagagtattacaaaatagaagaaactcacattaagcaaatttcagttaggttaaggaaataaggcagtttcaaaatgataatacagtaccaaattttacttgtaatacccttgttacacagcactcatttagatttttcttgttttgttccatataaactgaagataataatacttaaataattatgacggacaggcaatacagctcagtagtaatgcacttagctagactacataaggccctaggttcaattcctattattcgtgcaaaagggaagagataacttttgaaaaattaagtgaagtgaatcaagatactcagtgtagtacaatatcaaacttgaattgatacccaaatacaaagccatccaactcctgaaaagatgaagcaagaaactgaccccagattatctggaaccttggtgtgctatcacacaccatctaagctcccagagtgagtttgaaagtgataaatgtaaaactaattccaggtttcaaactgtggatatgttaaagcatttagcacttacatagcacctaataaaatattaaggtttatttttttattgtcagtacatatttgatatgccctgtggaaaataaaatatagatacataacaggaacgtgagaacacttttcaggtttatgtatacaatgatctctgtcataatgtctgtaaattatgagtgatataaaaaatttaaggcagattggtcattctcagaacgactaggaaaagtgtaggctgttatagttggtgcttttagaatgccttcaggtagagttagggaaaatatctctttctagagaaactgctaaggaaatgacatcaagacaacaagctacccagaggggatggcattctactttaatcccagtacttgggaggcagaggcagatagatctcttgggttgaggccaacctggtcttcagagcaagttccaggacagccagggttacacagggaaatcctgtttccaacaaacagaaacaaaatcaagaaaaaacaaaacaagggaagactaagtttagggccttagacaagtccaatggagttgaaaattgttttgtaatactggtggaaaatggtgtatataataaaaacaaataagcaaaacaaacaaaactctttacagtgtttggacaataagataataccaaaacccttaagcacagccctgttcaacagttgcagcataagctccctgacttagaaatatattctgatatctatctgggatagacatgaatgagcaaagaacagaggtgggaaacaatgcattacaagaaatctcttcagtgtgaagagactcttgcttaccaggaaactcatcttcacaaaaatcaaagttaatcttataccctaggaagcacaaaaatatttactttatattattgtatctattgatttcgggaaaaaatccagtatttcatttttatgagtttcaggaaatttaataaataaaatatgccacaaaattgatatcatataacttctttcacaaccaggagttgccatgccgacctttagttccatattagaagccgtaattcaagccacacaaaagcctataaacttacttgtgtgttgcatagttttctttgcagcagcaaaagtaaaagacaaaaagtcattttataattttccatctgcataatctattatttgaaggattctatgctacactgttaactttaaaactgaattgagttctagtccagaacccattgtacaaggcattgaaaccaacatggcctttgctgtttctcttacttaaaatctgacatcggtgtggtggtgtatactaaataaatctgtgtttttttattttggcctggggagaaatgatgaattacaagtcacccaacaccagcactgaccaaacaagggacagcagtgatggacctgtgagtttattgaaagtgcctatgacagctcaccttatgggtgactgactcaatctttgagcggaggcactcatgtcagttcccaagccttttaaatttctcgtagtgtcctgcctgtcagttcagaggacaatgctgtacagtactttatagactagaaaccaattccattgtctcaatatgccaatatgccagtcagatgaggttaagaaagaaaaacaattgttgatcatcaaattgaattacttgcctatattctcttttctactactatttaaatatcctatcaattattaaaatatcaaatagagttatatttgataaacatctataacatatattacaaactcaaaatataaatagcaaatatttagtaatctagcaaaattttaatatcactgataatcgggggaacacagtggttttgaatctttgcaatgtctatgcctaatgcagtaccatgtttccacatatgtgaaagtatgcagatattattttcaatttacctaatatatcaaattctagcatacataaatgagagctatcttcttattttataaatttaatatattattacataatatttcataactcttcccttaagcataagataaagtctatcaatgaagacaaggaagaatgctattaagtagttcagaaactggcttcctgacataaaccatagtatagtactgcagaaattactctttggtttcattctttaaatccacatttaagttaattcatagcaaattatatgttgtatcttttttctttaacattcatacaaaactgcactaagagcctagaaagactttgagccatgaaactaggagctaattaatagatgccttttattttcccaaatactctgggcaggtctaccatagttacggatgagttattttgtttggaagagtaagctttttcaagtggctggtatcatcctgaaaatacctctaagtgttggtctaggtggctccatagatccaaattcccgagtttcaaatttatgaagcagatagggagttttataacctgtgtgtgtgtggaatacatttcaactgacaagttaatatgcagtgtctacatgatcttgcactaatcattcattttaaagaacattgcatctccatgggattatatctccatgatttcagtacttcaggcagagatacataaaaatggtagtcttcagcaatgtatacatgttccataggaagtgctgaaataactttatatatcattttattccattgtcttatgattacaacccatagtatttgaagtagacgtgaaggtctcccttgacccagggcctaaagcatcgctataatgatccttattgcctctcatgttaaattatctttaacccagtctatttacttatgaccttctgtgctcacctgactttttctcagtttatgaaaagaaaaaagtgtttagaggaatcaagttcaaagcagcagtagtgaaagtggatcacagtagaatttgtcatagatataatactgattagaaaaagataaaaactttctgacatgatttaatctcaaatatggaaaattctgacttaattaagatacatttatcaacattaaaataccattaaatataattagtaaaatctaatgaagcgcagaataatgagttaataaaatgtgattgtaacatgtacctaaaatgaaaacagtatcttcaaaattatggggaaatcaaaatacaataacatatctgtgataactgaatcaaaatcaaaaaaatcaaattattaggttcaattagcctagggggaaaaatgtcccatgttttataaataatgacacagttcatacaggtgcgtttggagtctccaaataatatgaagattctcttggacaatatctgatgtatcttgtttgtagaaagcttaggaagccaaggtcatagcatcttctgctcttctctaatgaagcatcaaaatggaagcttttcctcaccatgccttactcctttgtggccggtccctcatccccttccttcctattctgcttttatgagccagccatttcacaaggcatttcatgagaacatgagagtggtcacatagattagctactatttcactacctagaccagaaaacaaaacattatgaaatgattcatatgtatgtgtggtccacacaagctagaaatacgagcaactctatgtttatcttgaggaaatcctcaagaaattttcatggaaattttctttgccatgctgtaactacaccagggaaacactggtaaatattcacattacactgtcaacctaacaatggtggttctctgtccatataattggaagtgaatgtatctttccattcctgaaactgtctcaacccatactacataaacagtttttttttgttttgtttttttgtttttttttaatgagccaccataactctgtagacattggtccagttttaggtaactgggacaggataacattcagatttaagatagaaaggacacatttgcagcactgacatgcaagaccaccattagcctgcacatcaaactttaattttcaaactactaaacttatctcttctgtttattttcataagaggctcctagagaccagtgtcaatattaccttcctatccgattgaaataatttacttgtcttgcttgatatgttacaatatgtggtaaagttacaagtactaaatggaagtggagagtatagcttctgaaatacagtgtctcacgaagaacagcagatactggtaattgtgctttatttaaaagactcatcctttcttcattgtctttctcttagggccattgaggttcctttcccagacggaatctatcacagccttcatgggagatacagtgttacttaagtgtgaagtcattggggaacccatgccaacaatacactggcagaaaaatcaacaagacctcaacccactcccaggagactcgcgtgtggtcgtcttgccctccggagcattgcagattagccgacttcagccaggagacagtggagtctacagatgctcggctcggaatccagccagcataagaacaggaaatgaagcagaagttagaattttatcaggtatttcagaacttagtgtatcctccaaaatatgacatgattttcttggacagatattttctaaggattacacactctgtattccttactgagggtttttgtttatttgtttgtttgtttgttttattgattttctttgctattatactgtatgagataataccagccatttttaactttctgtatactactaaattgttttgaaaaatataaatatacttagcatcattcattttctcatttattcttttatttgtatatgtctattttatatttttgtcaaaagcccatttataagcagttctcatgttatttcattttttttctgacaacagtctaaaagactgtattattcctagttataacaatgaaagggtttatgaggtttaatgtcatctttatattaatatttaacaaatatctactcaaactttggcacaataatttcttaaatgtcctgtactgtgcatgggagatctaacattgattaaaactgacacagggcctagtcattaagagttctcagttaatataaacatataagtaattatgaaaaaaatgagattaatattatgatacagaattttattgctttccatctttcatctttttttcttcttcttcttcggtagctctctatgattctggccatttcattacctttttctaagtagccagagtctggttagctacagttatatcactgtgcctttcaggaactgatattatcacacatttctatagtatctatgctcacacttggtcttccttcttaggcagtcctctacatactttcatgaatcacagaaaagcacttgaggcatttgaataaagtgctcttcacattggtagatgcttagttgtttgtagttatcataaatatttcatatatagacaatataaatctttctaaaatgaaaactattaattcaggtgaagtttattcagcgtgataaagaagtcaggtttaaatcattgatctcatttccttgtgtctactatgctccatcagtgacatagatgctgacctcagtgtgcaggtaagtattgcacacttctaccttgcaaccaccctgcaacgatggtggagcatttattagtaacacatgctcagacttatttaggaaccaatttcatacccccaaattaaatattcatatttgtatgacatgaataatgtatataccgaatcatcagataggaagccaaagcaagtcacatttaaagtattgacaagaatatgcttcattatctcaatatgacagaagagcctgtttccagtaacattcaggaatcatgatgaattaatcaattatttaaattttaaatagaaaatgcaaaacagacatcaaattggtattggcctttattttttcaccatgtagactgtattgtaactgaaatgtgtggagatttaggtaaagtcacattgttaatctgattcaaataagaagacatatgtgtactttggaatgatgggatatttctcattagaatgaaaactaaagtgaagtaaggccagtgatatggaaagagtcagagggagagagatggatatgatcatgttacattgcgagtgtgtaagttatggcatttagctcggtgttttggcagaagtcctaacattggaagccagtgtttctctggctcttttgcctgctctcgagacccttttcctcctatagagttgtctagagtagccttcatcagtagagatttgtcttgtctgattgtatcttgttttgccctgttggactattgtctcttggaggattgttcttttttgaagaggaaatggagaaggaatagacaggggtgacaggagagggaagggagagttggaaggagtagagggaggcaagcaaaactgtggtcagggatatatatgatagaagatttggttttcaataaatacaaaatgaattctcaaggaaaaactgaaataatgtaagatattttatttaaattcttgttaattcaaatactcaatcataaaattccaaaaattataagagaacacacagacacacacacacacacacacaaacacacacagaggagatcttacttgactgagtctgtgcatgcaatgtaatggtttttgtaagagaagttctgtttgattcatttgtaactaagttttcctgtttctttagatgtaaaacacaaaaatccccccaaaaagttataagattacacaagagaatgagtaaaccgttatccttaatgcctgagttgctacttatgcttctctgatctttagcatcttgttatttttcctgaatcgggttttcactttaccagaagcaccagcttgaagtactaactgttacatatacatagtatacatttctgttctagcttttatttaattaaaagtgatatggcccgtaaaaccgaaacccatatgtgattagcatgaattagttgtatataaactgcagctgcacactgagatagcttgtgcatgtagtgtatacactttgtaaaccgaggcagtaatatgttcaccagattgagacttgactagcctaggtaatgaatttcaggtcagcttgggatacagaataagatgcaaaaaacaaacaaacaaacaaaacaaaaaaccccaaaaaaaacactaaacaaaaaaaccaaaccaaccaaacaaaaacagaataaaatcagtattggaatcataaatcattaaaaacatctttctctaatgccaaaattcctatgctggttaagttatatatctcattagtgctaaaatgaaattttaaaacttcaccagcacatttattagcattatttgctaaggtatttagatttatttacttacttacttacttacttacttacttacttattgcctttgcaatactgtggattaaacctagggcttccaacatccagagtaagggctatatcattgattgctatccctaccccttctttctttttctatttcgagacagggtctaagttacctacaataggcttttcctcaccctgtagcccagacagtccttgaatttgggatgttcttgcctcaccttcttaattatcagtttagaaacctcttttagaccccaactattgtcactttccatgtatatgttcacagcggtttatctaaatctaaataacattataaacttatttaaactcatggaacacattcccagtcataaatatcaacagataagtagactgttaaattctcattttgctaagtaagcaatagtgatatgtttcaatttataactactgcatctcacattgttttgactaacgcctacactgcagcctttggttacaaaagaaaagatagttgataaaatcctgggaagagagtccataaagcaaaaagatcacactgtggacaacacaagtcagcatgacccctcactgtgtgtgagagaaacatcctttgcttatcatgatggtcaagtggtatttagctatgacaccgatatagaaggtacaagagaagctggagactgagggaatgtcagagattctgctcgaggggattagaaaacagaagtgatggtgagaagaggcagaccagaagaaaagaagttaaactgggaagaaagtcaggtagaacttgtcatgataatcttgcagagaactgaccaggagctgttctcatggtagcatcagaattgattaaagaatggagatgttctcaatattgttaagggcagatattataacttaggagggatgaggtgccattggggttcagacagaatcccggaagtggcatgtgagtagagacaagtctgtggccatgtcttccatccctacaagcatgggcatcaaagaagatggttattatagataatgtcagtgatgtatttcaagagaggttttccatggtacctcattttttatcacaagaaaataatcatttctctcaaaagtaggaaaattggtaactaatttaatttgttgattaatgatttaagacaaattgagtttttccatatgagtagttatatgtttttgataaagtaaattagcaatgaacagctttaatacacattttttaagtagcaacagaagcagtacatgttgtgatgtttcaaaacattatatgtaatggggactatatgacagattgaagcatccaccaattgtggttgtaaaattaactttatttgtggttcaccatatatgaatgccaacccagagaatggattactgatttataaaactgctttgagcagtagattgacaaaaagaacttgtctaggcggtagaatttctgtatcagttttcttaatgatctaattgaattagtcagttgataatctactgcttgtttatttacctatagtcaagtgatgctatgtcctcaaaaggccaagaggaattaacttcctgtggtttgttgaagatatattctatttttttgttataatgtttaattttatttcaaatatagtatgggcatttttaaatttttatcttctttgtgagcatagaacagataattccataatatcattaagaagacaatattatatttgaataaattatccttttattaaaaaataattacagactttcatagaaagaattcccaggtgcagttccagaccaccgaaataatgtgactcacaaaacacataaatagttttgcttccaagtacgtatagcctttatatttacactattgtataatttgtgaaaatgtccaattttattgtcccccaaaacaacaaatgtgattatatagatagatagataggtagatagatagatagatagatagatagatagatagatagatatagatacagatatagataattgctacatattttatatcattatttgttgttattttttgagatatgctattcacttacacacaaagaaacaactctttacaaaatactactcatcattggcagtgatcatggtcactgacagtcaatttaatgagattatagtttcctgttaataatatatcatctattctacatcccagggttcaaagattaagcaacaaatttatacatttgaaatagaaatggctcatttcatatacttcatgaattaaccagctctagctttacattttcttctaaagctttcttatgttgcctacctcaatagcatggaatggagattagggatttgttctaggttcgagtttgatttaaaggaatttcatgcctggattgatcttccttccagtctactccatgtcaccagaacaactgttttgcattcctaacagttgtgcactcaatagaacagtgcttaatttctttctagaactttttctttgtattgataacttggataagtaattggtacaacagttcttgctttcagtctacttaagctttcagtaagtcacttccttactgaacgcgtttcttgctttgaatttaagccatgaggtgaacacttctttcaattatatgcaatcagcccaatttttctattactctgtctcaaaaatgtatgtgtgtgtgggggggggggatgcgactgaggaaagagaaatatggaaacagtggaaaaacacattttcttttatgtttgctctctatgctatgacttctcaaaatagttacagttacagggaaaaaaaatcactgatcacaaatccctaaacatagattataagaattcaaaatattgtgagaattatcaaatcaagagagacatggtgtgagttcatggtgttggacaaatatggttttgacagacaaacaaaacacccaaacaaaagagcaagtatttataaaatacaaccaaaacagaaaaaaaaaacataagaatatatcagagaacatgacaatgttgccttataatatattcagagtaatggtcttcaagggatggtgaacaatatactaaatctaattttcgaatgaatcatcgtgctaggctgttaattaatgagagtatttgactaagacaaagaatggaaggggacataaacgtgaacataaccagctacaaataagcaccagtcactaaacaagcctaagttgagatttgcatagtcttgaagtccgtatctatgatcagaggaatactttgtgaaataggattccagaggatgctaagtatggaatataaagttcaactccgcatcctgagagtcttaaatctcatggacaggcattgcaaggaagtacatttgtctgtggttgggaatatttgcaactgcttgggattggatattctcatagtagtatagctcagaaaaacagcaacatggaaataaaaatgaatgaaattattacctgtgttccattcatatatatttttaggagagaatgaactatgttagtacattacattaagactcatgtagtacagattttctacaaaccatattttatctagaatacatgaaaggggctgaacatagactaccacaatccattttcctagattatttcagaccgagttagtatcccaatatattattatgaaaaatgattaaggacgcggatcttaacattaaactaagcacgaatcttggtttcactcctccaacttgtacaatttagaacaaattacttaatttaaagcattatcttgtggaacaaagacagagataggatatattttgtagaatgattgtaaagattaaatttgacaggccaaatacattttgtaatcctcagcagatagtgcaattattcttgcattttagaagcttcctcaacactaaataatttgactctcatgggaagattattttcctgattatttaccttgttttgattacgggtatacaagcgcctgggagttaaatatctgtaacttgtctaatcttctctctctctctctctctctctctctctctctctctctctctctctctcccccccccctctctctcatacttaagccacagatacatgaaagcactttccctccagtatctcattattctatgctttcaatcccttccctctccatcttctgctgtactaaataagccacattggtttaaatgagaatgagaagaaaaatatgattgctagtatttgttcttcaaaatccattagcaattcatacaacactaatttcttttgctcatttctgtacggaggagaggtaggatgtgatctgactttgcaaatgtctgtactgccaagcataccatttattatttccttccatgttcagccccaaccctgcctttcagggatttaagagttccagtttgccacagagactccaatttttgatacatgcatggcaattgcagtcatgtaataattactgataaaagagtcagaatatgagggttttttctatttatattaataaaaatcccttcattcagtttatattactacaaaattcccagtattaatggttgaatgacttttattatcaccaaggaactatgtggtctcttgccacgtaggagctaccatcggtgggaacctgggctcaagggttgaggagtgagtgggcattcgtgttatattaaacttagatacagcagataaggtcacatcttaatggatgtgaggcaactgcgaaagccactatttcaatggggttgatcaaaatccttttgggggctgaagaaatgtctccgtggttaattgtacttgttgctcacatagaagtttaggttcatgtcgcagcacctacattttggctcccaactgtctatacctccagttctaggatgtccaatgcacactgagataggactatgtgttgtgcacatacacacatgcatggaaaaatgcaatatgtaaatacatctagaacagatttaaattatatcaatttaacaatatctaccatgttagtattatgaacttaatttctacaggtaaatgatcattctctgaccttgagcctatcttttatcacaattggggtaagaaaccatgattcctatttgaaaaggaaaatactggtggcaggacatatattacaattccaccggcctattactctcatgtcacacaatggtcatcccatcatcgaatacattgctgtttctacttttcctggatggtgaataatgtttagttattgattattttatattcttttagcttccactctatgaagagttactatattccaaaaggtaaaaggcaaaaaataaccttcttttaataggcctccacatggaggaatggttgtttcttgagcagaaggactcattttctcccaaacacaatgagtcaaatgcatgttcaccttcaatgaggtagtagcaggcagtcatttctaattcagacatgagggtgggtggaaaactgtaatttgtcagtgcaagtgtcaaaaaaaatactgaaatcaccagaatatttgccttttccaaaatgtttaatactaattatttcctaggaaaaataaaagcatattctgttttaaagtataaaagctttgcctttattaccttaacatagtctaaaaagcaaagaacccagatagttttagttgaaactaaaactacgaaaaacaagtattaaaataaaagctgcattactctgctggatagtttccaaagtgtctttatatatgaattatgaagaatttttgattctttaaattaactttcagatatcataatagcaacatttgtaattctaaagtcagcttcaaaaaaaattaaaccgttctgaaaaataaaagtcacttccttcagacccgcttcagtaatgactgaaccaaaaatttccccgagagacagaagcgactcagacatacggttgtgacaagaatagattactctttcttccagatctaaccacaaatagaagtaagggtgcgttcatggaaaaagtaagaggaaatatgaacagatgtaggaatatttacagaggatgccacttttagtaccagagtagtataaataaggcatgaaaatgacagaatcccagggtgaagaacaactcctgagaagtggcttcttgcttcctctcagttcaaagctccccagtgtacggttcaatgacagtgtttagtttatacttattttaaaatttttttcctgacagacaggctgtgtgtgtgtagccatggctatcctggaactcactaagtaggaaaggctggccccaaactcacaggaatacacattcctctgactccagagtgctgggattaatgtgtgtcccacaaccacctggcaattttttaaattttctttttattaaatattttctgtttttgtttgttagatgttgttgtttttctttttctcttccttctttcctttcttccttccttccttccttccttccttcttctttctttctttctttctttctttctttctttctttctttctttctttcttttttccttttttctttcttttttctttttggtttttcgagacagggtttctctgtgtagccctgcctgtcctggaactcattctgtagactaggttggcctcgaactcataaatctgcctgcctctgccttccaagtactgggattaaaagcatgtgctaccactgcccgatttactttctggtttgtaatacacacacacacactaacaaacattgagttgtatatatggaaaatctcactctgagcttacaccattgcatatgcctgatggtgatagagaaactaaggactgcagaagctagctagaatgacaatggctacacagccaataggtgagtggcaggctagcatgaaggcggaaaagcaaatagagaaagctaagaaactaaggcctgcagaagctagctagaaggacaatggctacacagccaataggtgagtggcaggctagcatgaaggcaggaaagcaaatagagaaagctgtcgagttaaatgaatttgtaagacgtgtgcctgagcttgctttgctcttcagctccatttggaatgcccataataatccattcagctttgatattaataaaacacatcatagagtatacaatggggggaaatggttttatgttcagaaaatatgaaaattaaaaaccattactagttattttcagagtaacagttaataagcggagaaaactagttttttttttcttgctgacacagaatcaaaaaatctataatttaatttttctatgcctcagttactttctcagaatcagcatgtaactttaatggtgaaattcctaaataagggttctggaaaatgggcctgttaaggacaggctatcatcacagggtgaacactcacttccacgtatctggaatcctctaacaccacgtctcatgacctatgatgagtataagagaatttccttctacactgaatacagctccagtcagatgactgatggggtcaaaccaggcgtttgccatgagggtcttaaacagccaacgtctgatatattagggaaaaatctataaatgaagactgttcctaaggagtctcaaactgaattgtaatgcttgagagtcccatttgtctcagaaaatgccactcaaaactacctattctccaaatgcactagcaaacttttcatctacatctgtgtatcaggggctccagtaacacttgatgggattttttttctcctgcatatatcaatcttaggtggagtgtcatagtatatgattctggaagatcaaggaataactgtcgcagtagacccttcctggatgataaagttgagacaaaggagaaggaagaacaaaagagtaggaaagggatagaaatgatgtagaggaagagggacagggaatgcataccaccagctcttatttgatagatgccaagctgctcttgtgcgatagagctcgtgctacttgggtcttcacgatgatcgctcctctgatctgtctctgcaggttgtcaaagagtgtttcatgggtgacttagttagggtaatactttcttctgtgataatttgaattccacacagaactagcaactttttttgttggttccccttatgggatgaacatgagcttgacttgagcagacagacagcaggaaggaggtacctttcagatgcagacactagtgagatattttatcaaaagtgaaaaacttgaatgagtcacttggggaaaaatattgtctactgtgaattaaattcaagcttctcagctaaaattaggaatttgagaaacatgcaaatttgactcgcactttgacagctttccaatattgagagtcatttcgatggctatgctggtaatagtaacaaatgactttttctatcatgatacatgtcaacagttggaagtcctgactaaaatagtatatactattccaaattaccattgactgatgtgacaaaatcataaatcattcattcaaagtagaagatgggccagatgcattttttataagatagcacagaatgtttattgataccatgtcagattctgcattacaactaactgtcaagaaactagttgttgagagtcagcatagtgttaaagttctacttctacaattatctgaaaagtctatcaaaatttgcttttgactactgtaaatgttagagctttgagacgaaagtcttcccaaatggaagtgttccagtgctgaatgggaatataagtgtctgctgggggcaggtaccaaactcaagtgttacagctctactctaggcacatgtaaggtgtgagtgtgtaggagagatgtttgctctggagaaaaaagtatctgacagttcggttctgaccttgggcttttcattttggaatggtggaagttggccacttgctactggaggggctgggtccagacttgaagaccattacaatgttctgttggtagagccatgtggttggagatcctcaggggtggaattagaaactcacatgcatctggactatttacaggaaatacaaccaaaagtaacgatgagaaatgtataaacaagaaatcatcttaaaactagcttattttaaatcaagccacccaatcaagaagtttttacaaatgcaagaaatcaccactattatccctgctatttttgttggattatcacattatgcttgaaatacccattttataaggttcagttaccttaagagaattctttggagtcctcagtaatagccagcagacttggatcctctgttgacattatcatgtaattctctttttaatgatttcagaatagtcccctccaagtcagatagcagaagaagcttaagtaggccaaaatttccatttaaaaggaagtgaaaagggagggaacctcaagaggaatagtcaaaggtactgagttgctatgtgtagtgctgtgctccaaggcatcttgaatagtccagggaagaactgtgtctgaccccgtaatcactatcttctttatccctgtttatatactgctctctttgtttctaaggttgccagctctggggactggtagattagcttcaaaccaaaaccaaaccaaaccaaaccaaaccaaaccaaaccaaccccaaaaaaaaaaaaaaaaaaaaaaaaaaaaagccaacatttttttttcaacagcaaaatctaaactgggttttagttgaagtacatttttattgttgcaatcaaattagaatcacgaataatggaattttgaatatatccatgagttttacattatagaaggtttttttcacaattgttaacattaaaatttggcacaggaaaacattttatttgttttacggtagaaaacttgccaaatctgttatctagtaatgcacaactctctccaattttatcttaaaaggttttatatgtgaaatactatataaggtatatgtacagtttaataagtaacggtaatatgatcggactttcctttactgtagtgaatatgggctcattagttcacttgaaaatatttcacgttttaccagggctggaatagttattgctcatatacctagaacacaaataacatttattattgattaataattccatcctattcttatgaaagtctgtttagataacaagagttataatctagaattgcaaggtcgcaccagaaggagtttttcataaaaacaactatgaaacttagaaggagaattttcatttccttttaaatatttgcctgaagttttagtcattaacttttatgattcttttctctttgtaaaagttctatatacctagcaacagtggagtttaaaataactcttcactctaaaaatactacatgccattttgaaaacctttagaaaatacaggaaaatttaaaggtgaaaataaaagccacctgcagttctatcacacaaagttaaccttagcagtcatctttagtctacagatttgagatataggcatggcttctatacacggagtatttaagatgaaaattactggcctagcaatttctttttcttgtcttttggctacacaatcaaagaaagtgagattgaatctggctcaggagaatgactacgttcatcctcacatcattcctgatgagatcagcagcagcctgcactatggtggggttgtgtgtaatctcacgttgtgactctccacttacctctgcccaatatttaggatttcatcatctcagtttctgtgcattcagatttttacttttgagtttgcagcattctctgacaagttaattctccttacttcattaaggtaaaaagaaccttgattaaactttcctacaggggtgtggagtttaatgtaatgaagaaacttaataattaatatatcttcagtaaatcaattcagatgggcattgatcaggctagaggataatgctattgaattgattgataagtccccaggcagtatgcctggaactctgataatgaaaagaaggatgtgttttactcggaagagtattttcctgagtgttgagacccttaggtttagaacttcagcttcatccatgggatgaaaagtcagagagaattgatgaactgagtctgagaatgaagctcctgaatcactaggttgcacttctatgttagaaaacataggtgacacatacacagattaagtactgttgagataaagtggaaagaaactgaagtcttcattcatcctagcactcagcttgaaggacaagtttgctctttgaaaacattttaaaatttgttaatgaatagaaaacgaatccatcaccttgtttacttttagaaagcatggaagaaaatgtaagcaagagcagcttccatttggaagacaggaaatggttcctcaaaattgtattttttttaaatatactgtttataagctgtgtaaaatcattcttacgtttgttcaatttacatatcaatacatggaagtgattttaaaaaactgaaagagtacaatagagatggttgcaggccaagtgaatgatcagtatttttggatgatgacattcagatgaattgctgtaaatattgtttgtttctctagtaacgattagtaaataaatcctggagctgaaataaggatcttgcagcgtctaccttatgccatttgccttatacttggattactttggagcaaggaatagtctacactctgaaagtggagaaaccctgttgagattttatcttccggtttctttgcatgtatcaacttttctaactttattctcagatataattttttttctttttatctactcttcttttttattttatttacatttcaaattttacccccttcgcagtttctccttcacagaccacctagccccctgactatgagggtgctcacccacccaccctcaggaccctagcattccctacccaagtcattgagcctccacaggaacgaaggtctcccctcccagtgattcctgataagataattctctgctacatatgccatgggagccatgggacccccctcccgccccccgtgtgtactctttggttggtggtttagtctctaggagctttggggagtctggttggttgatattgttcttcctattgggttgcaaacctcttcagttccttcagtccttgcccagataagattttttttttttttaaagagagggtctccctctggctcttctggaatttacaatgtagactaggttggcttcaaactcacagaaatctaccagcctctgcctcccagatgctaggatcaaagctataagctactaatggctggctattatacattgtattaatgatgtaaaatgtatgagtcaagctaaaaaaaaaagttaatgagattatatgatcctgtgttttctttccacagacccaggcctgcataggcagctatattttctgcagagaccatccaacgtaatagccattgaagggaaagatgctgtcctggagtgctgtgtttctggctatcctccgccaagtttcacctggttacgaggcgaggaggtcatccaactcaggtattacccacctgggaacttgaaaagtatatgagattacttcttactttctgataggtccaattttcttaaaataattagctctgttttcaaaaatctttgtcatgattagtgtatcaaagatatttaaccattttgatcagagtatgaggaaagaagtaaaaacccataggatcagctgttctgaaggaaaactgaaaaactggattgatatcaagatgcaagggcattagatgatgtaattcacaggaatatgataaagagaaaatagatcttatatatttgtaaaacaatgcacacatacatgtcactaagctgacacagcaatcattccatattacatgtacacatttgtagttcatacataaaagagtttatagtatatcacagatataagcaatttcattattcatagtatttcactaatggcgaaggtaaaaacaaacaaacaaacaaataaaagcacttctttagtttaaagtatcacatttcattgcaaagtctgcatagatattttagttctaagtgtgcttcttattatcccaattattataaatataacgtaataccggagaacatggctcacattcgattatctcgcaattaataataaggaagggttagaaagcaagaccatagtggaaagtaaatatgttgattaaatggatctcacttaagaaaataggtttattgattagaatgactaatacaaccctttaatacatttaatttccatgattagatatatacatggatcataaattattggttaaactttatccaatttaagtaagtatttagtcaataatagtatatatattatatactaatattatatactatatatatatatacactatcacatttctggggtcattaggagtacaggaagtccagtttctgaatcatttatatatgccagatgcttttggttcagctgaaatgatataccccatggtatatcatagatataaacaattttcattgtctattatatttcattaatggtgaagttagaatagtagaatataagcacttcttcagtttgaagtatcacatctcattgtaaagtctgcatagatatttttgtctataggttgttaaaaatatttttatatctatggatgcatagattattttagatggtgactgagttatatgtcaaagcaggcactgactttctctcttgggaacaattttttttttttgtctttaaggacttaaattttaaagtaatagaatcaaaaccagagtagattattgggaaatttcttttaagtactgttattattgtactattatatttaatctatgtcatctctgaattaatacacgcatcgtccccatggaagtttaccttgaatcggtactagttcaaaaagtgagctaagataaagcctcaatgatgcaggtattttaccgtcttcaattctataatgtgagcctttgtaaacttcatcagcacttctgaatttcagcctgatattcagaaagttaacaggcctccttatttcacgtggcctctgtcttacaggtctaaaaagtattcattgttgggtggaagcaatttgctcatctctaatgtgacagatgatgacagtggaacctatacttgcgttgtcacctataagaatgagaatattagtgcctctgcagagctcacggtcttgggtaagttagtgattggagatgagtttacagtaaacctttcaaaatatattgctgtaacattttaaatgcatatagtcgattgccgactgaatttattggtgtaaaattgaaaggtccctctactctatacacgcccacactttgctttgattaattgcacgagggctaaatgcagtgtttgaatattttctcattgattaaaagccatatttattactccttactctaattaatttttgtcacgttctggaaagttcccccaaagtgttaatatatagataagttgtatcacaatgaaaacatctaaaatatcgtatgtgcagaaaaataaatgacaacaaaaatagaagttttataagagtgtatatgagtagaaaagcagatgatatttgtaatgtctctgacattaaattcagtgggatgagtagattgatttattaatataaaataactagatgtcatgtgaaaataaataatgaaaatctaatctatttaaggaaaatttgcatagcaagagtgtaatttaaatagcttaaagtatatggttggatttatgtccttctggaaggcaggaccgcctatgccttattgaaaattaagaatgatgacccgtggtactagctctgacaaatgaatactgtattgtggtcttcaattttgttttgtttatgttgggagaaaataccttaatattttactttcttttctcctgtatactacagaaattggatttttgggtgtgtgtggggaggtatttgtttccaattgaatagggtctatatccttgtattgctgactctaacttatgttttagagctagatattacttctataatcatttaaaaatgtgaaggtagaaaagtaacgcgtgctttacaaattaaagctaaaaaacttgggctggagagatggcttagcagttaagagcactgactgctcttccagaggtcctgagttcaattcctagccaccacatggtgtctcacaaccatctataatgggatcagatgctctctactgacgtgtctgaagacagctacatacactcatataaatgagataaataaatctttctttaaaaaacgaaacaaacaaacaaacaaaacaaaaaaaaccaaaactaaacaactcattgcaaataaagggcaaacataatctaatatcgtcaactttgtatgtaacaggtaagaatggttcataagtgacatccctcctaggctatgctgccagtgaccatacactcatgtttctctcacacaggtacagctaaccttctcagtttttactatttaaaaacataaatatgttgtttgcaatgtcttagattgtatgtatgtttcttctctctctctctctctctctctctctctctgtgtgtgtgtgtgtgtgtgtgtgtgtgttttctgaactaacatagaattagagcaaagtccacattttgctccaggaaataggaaaatttgtgtttcacttaaagatgaatgacagcttctctgatctcggtttttgaatattctcctgttattttttttttcaattaagttgcttgaacttaccattttatatttgaaaagaaataaaaaaaaatcacagacccaattattaaaaatttataagtaagacagtaaggaaaagaatatagaactgttttacctccataaaaattgcaagaattttccctaccaatgtagtgacttcttaccactaaattgatgtttgtattataaccaattattttccataaatatgcctatagatttcatatgaaatgtgtcaaatggaattatctttaaatttcttaacatatagacagagctatgcttatagttgaatattctttatgttattttttgtttttaagtaattcccagtggtactaggtacaaatcttaaacatcctcctcagataataaatgactgatagctattaccaaaaacttgatttaataaagaagctggttagagtcagttatgaatatttaatcttacctctaatataaatgttcatattataaagtgtttttatatagtctcagattttcctaatatagagttagtgtctctggagctgattgtttatttgaaaacataatttatttctttttagaaatgtgtgcaaggaaaaaatggatcttattattaatgttattcaaacatatttttctaacttttaaaaatttaagcatagttgtattttttgtaagactaaagccccacaaaacataaagttgtacttataaatttttaatcatgcatttttatcaaattcctgttctgccttacatcttttgatctttcctggacctttactagctttgaatgtgaaccttcctgaacttaggactttttaagttttgaaaactctagattaaagggaatgcagcagccttttgcagtaatttaagtcaataaacatcaagtataatttaaattgtagcatttaccttgcattttaataaaatgaaaattgaaggtttcatgatggttaaggcatctggaaaccactgttttataaaatataggataatcaaataataacaaatttgcagatatatttttaataataacaacttgtgagtctgtacttttgaaagtaaatacatccatctgtaaatatcattggacattttttgaacattagcataagacttgtttttaagaaagccacaaaaggtttgaaacccaggcttattgaccttgtaatatattaaaaatttctaagttgatttctccaatgcttataaggcattttaatattatatctaaatgtagaacacttggatagatgatagtctcttgctctttctctctctgtctctctccctctccctccctccctccctccctctccctccccctccacccttcccctccctctccctctccctcgccccctgtgtgtgtgtgtgtgtgtgtgtgtgtgtgtgtgtgtgcgcgcgcgcatgcgtgcgcatgtgtgtgtgacagtagagcagacagtagcatagagctttgtacttaatggtggttcaaaagcacagagaaggagcaagaattgttcaggagtgtggcatttccttcaaaagcacacctacttctctgtgctatgcctggactcctaagaaaatttcacctctgaaattattaattgattatccatcaatgataataatgctcccatacttctttcgtatcaataaagcccttagttcaggaccaatccttctacaatacacacacccaaaatagtcaaagtctctgttctcataggaggaggacctggcttcggggagtaaggccagggaggggtctaaggagaagaatacttccagatgttctctgaaacatgtagccaatgtatatttccattaaagaggaagtactgtggttcttaattttataaactttataaccattttaaaataattatatagtttcgtcttgtccaatcatacatccagcatcctttccccatagcttagatagtttagatcatatatcgcccttttccctagctatccatcctgaccctcatacaaaccttatgtttactgtaagacaagcctcaacaaacatatggaagatttgctactgtttcagatcaacattgatctggaatctaagtttagtgtctgaatcaatgcagacatgcatactgtatgaggtatttaatctcttatcaataaagtatgaattttaaagtaacctctatacagttcatgaccacaaaaaaagggcatggatggggaggacatttaggaagaactccttactataagccaccaaccctacatcgataagtaatgaaacatttttcaacgttcccagagaaagtcaggaattccttttaaagcagtctacagcaattaaaaaaaaaaagataaaatgtttatttgctttaacaaatatgtggggaaattctaactagggtttatagaaggtgttttcctgggtatttgtacatctgtttattcaattttttttttaacaaaaccagtttggaatcaggaaattaaatgtaagaataccccgtgccttctactgtaagagtagcaatccccacttcccatatcacttgtgtttcctctgtgcttgaaactgaggtttgctttggctgattctgctccccatcagaaaggacccatagttcaaagcatgtgagtgttttaagtagggtgttttctatcaacctcagcagatccacattatataggtccacactgaactatagcttaatatacagccatgtaatcatgtaaggatagctccttgatatttgagtcaatgaggtgttgttgatatgtagagtacttattgaggcgtcaggagatgtctgaggttggtgctgatttgctctcttgtcaactatgaaccttttagaagaaagaatacactctaacatgactgcaagaaatacactgacttcttaagtaaggaaatccattattatcattatcatgaatacgatttatataatcttagtattcttgtctatgattagcagtgcagtcggtttgtttaagccagaagcagcataaacatgtgactaaagtgcccccgtgttatgtcagtgtagctgtgatgtcattaggtggtaggagttcttaagtttcattataattttgggaccatcatcatatatgctggctaccattgttacaaattgtagcacacacacacacacacacacacacacagatattatgtgtgtcctacatatatatacaccaaatatatatctcaaagaaaatttatttccagaactactttctatattctttcagatgttgtttcatataatatttcaagtgttcagcagtagactcttgaacaagcaggctttagaacaagaaagacagatgtggaaaaataacagaagggagtttggagaagagcagttccaaggacacaaaggctggctatgctggcaaatacgtgtcatctctgctcttgagaatctgcgcgagaaggtttagagtatgggccttacctgggctatagagcaaaaacgtctctcccctccaaataacaaaggtaactagttgctaaaaatctgttttctatgatgaaaatgcttaatttaccaccttactttctgacaaaagaatgcctcttaataaaaatgctcatagatgtgccaagctaaccagttgtagtcttagatgtacaaatggaaccactgtgcttagagtaaaccagcaaccaatgtcggagagcatctctgtgttgaacattttatcaaataatgtgtgggctcagaatggaagacaccacgcaagcccaggcttccaagaattgttgggtcaaaagctaagacatttgaaataactaaaaagccaaaatgatagatggaaaggcagagaggcaaaggatctgatgagtatatgataaaaaaataagacttcagtatagaatattcccaaatggtgggtggggggagaaaaaaaactctcaaaggagagaaagaaatgcgtgaaaaaataaggtcacaggtaaagattgttgctacagagaaataccaggctggattggaaagctggtccagtttctgagtgctcagccaacagcacaattagattttatctttagtacaaagccatttcaatgctaagcactttgatgtgtggcttatctcatctgagccaggtgggtaatcctcaattccttcacctttaaaagaatgataattgctccctcataggtttccctgactatgagaattagaagagaaacatattcaaaacagcaaggcatagtttgaatgtgccaggaaataaagaaaaaaacaaacacgcaaccccacccccacccagtgccaaaaacaaaacaaaacgaaacaaacaaaaaaaaaaaaacaaaaaaacaaaaaaacaaaaaacaaataaaccaagtctcttccagccctcaggagaagtctgaaactgagttgcaaagattaaggaaaggcaaacagaagtaaaaaaaataaataaataaacgacacattattaaaacatttcattcagtctctctttacccattttgcgttgcatccacaaaatgtttacagcggtaaatgtcccttcataattctcatgaattgtggaggaatcagcataatgacggcctgatgctacacagggatgttattggcagtaatcactagaaacacagacaaaaattagggccgtggcagaaggatgctatccattcgtgcagcattttacattaactttgtgctgtgctgctcataccccgctggttctgcttcacatcccagctagatgagaagaggcatacgcacacagatcactcgttcttcagctcggggcatacatttggatgtttttctttgtctctgctgagttgcaaacgtaagaatgggcagaaaaccccctatctaactctctatcagaatattttgtaagctatccattgaggctcctgattcctttctacttcatatatcaccgtaacaaactaaactgtggtctctcagaatttctatgtgggagccttaactctcaatgtgcctgtgttcagacaaagttaaggaaggtagagttcgttttatttaaaatttaaaagttaaatttaactttaatgtaaaagttaaggaaggctaaataaaacagcatgtaagtttacaaaggaacttgcttattgtgggacaaacagtcatacctggtccttaattcaagtgacagatcctttggatgtgtgtgcaattactttagaatctcttacagtataacacagttgaacaacccatacagatatgatcactcagatcatttataggtctattaatagtaagattgataaattattacttatttaaaaattcagattatgtaaaaaagactctggcaattatttggcatggccatcttgcatgtttttgtctcctagtatcatattcctttatactaggatacatttcatatcctagcatctgtagatgtatgtatgtaagctttggtacaaagatgttactgtgttggcacaggactacagagagccagaaattaaaactgaatgtatataaaaataaatcaagtaaaaggtataagagttgtgtccaatatgtcctaaaagttgaagatccattgtccattcccctttctcatgtcagcccaccaagaagagggcacatctagacacatagaagagccatcttcaaaataaggttagagggaatcttcggtggtgtcttagtcagggtttctattcctgcacaaacatcatgaccaagaagcaagttggggaggaaagggtttatttggcttacacttccatactgctgttcatcaccaaggaagtcaggactgaaactcaagcaggtcagaaagcaggagccgatgcagaggccatggagggatgttctttactggcttgcctcccctggcttgctcagcctgctctcttatagaacccaagactaccagcccagagatggtcccacccacaaggggcctttcccccttaatcactaattgagaaaatgccttagagttggatctcatggaggcatttcctcaactgaagctcctttctctgtgataaccccagctgtgtcaagttgacacaaaactagccagtacaggtgggaaccaagccaactgacacctttatcttgggcttttcagactccagattatgaagatatattttgtgtagcccaatgtactcaaaatcatgctaacataaccagttggccttgaactttaactgttaaagcaatcctttcctctcttttataaatatcactgatacaggagaaacatattatcagtgtggcttacatactagtaggagagcaatggtaggatttcagaagcatgaatacatcatgtctaccatagactgaaatttacttctttattgacaagagttttattttaatagttttaatgtctttatacagcattataccttccctttgtgccatttcaatttattaaacaattatgaaataagatgaactatacagttttttatattataaattaaattaggtattccaattttaatattaatatgttattaattaagattatgctcatttgttttctgtatcaattcttagattgctaaaactcagttttgaagaagtatatgtatctttgcacactgtcatcaacttctaggtatttttcaaaaggaagcaatcttttttattctagaagcaaaattgataattcaaagttgatatgactttttatctgtctttccttaagcttggtcctataatttttaatgaagcacacagtgcactaggtactcttcttgtgcaagtacaatagaccaagtagatatgttgagtcactcaactgtctatgtaaaatcagggagttccgtgaagcgctatacatattggctcatttattttgttttcttggtcataaatgggcaacagtaattgtggaatgcattagcctaacagttatccttccattattacacgtgatgcctaatatgaatggagcttgcctgaatttacaacatcactgcctctgtctatggaatagtcaaatttcatttttatctataattgccctcattgtcaaagactaccccaccctcaggcaatttaatgaatatactcagataaaggatgtgttaggtaagtttatactgcagattcttcactactaccaaatggatatgaaggattctaatcacaatactatggatgacagagacataagatctaaggctaaattaagtcaggaacgtgactttaaatcacctgcctccatttctctgtaagttctcttcttgactacttcctatagctgaaatcatggttgtaacaggcaaagttctagcatctaaaacattctgctaaatttctatatgggttatgagaggtaaatttatacttcaggccagtatttattgctagttccagctggttatggacatcctatttgtattggaggtagggtttgtttcactacaaaaatatttactttgacatctactgtgttctgatgtctaaatcgttctccctcttttgaaaactagagtttctgtcaatgatcttcatgtatcctggatattttttaatctattttttttcttatatgagtagggtaggaaggggaggaggaggaagaggggagaaggactggaaggaaaagatagagcctggagattaactactaacataaaataggcaatctaaggatatgctttaattagttctaacaatctaagcaaggtgaactgaccatatgtggctgacaagaaatgctgacagcactagaaagttgcacatagtgtacttcatgatgatgttatcaagaaacactcagaccacatgttagaccaggggaagtttgactgtaacaagactaagactcaattacatgctgtcattttaatcttagctcttaggggttaacatcactagtgtatgccatttttccaatttcaggctgcaaattatttctggatacagctttacattatttttatccttttaatttactgttcaagattcttaggtgtaattatttctatattttatgtagtaaggttttgaacttttattgtaactctcatgttttaacagataattagtagagtatatgttttccttttgaagtataaccttcaatggctttctgtaaacatagttnnnnnnnnnnnnnnnnnnnncacacacacatacatatttatgtatatatacacatatagcagataattaatagagtacatattttccttttgaaatatatccttcaatggttttctgtgtaatcatagttgcctgaacacacacacacacaaacacatatatacacatatacacatgtgtatatatagatatatatgtatacagaacatttaattttaaagcatcctgactacctacaaagaaactccctgtcctttagcctgaccttattgttctcctcctctgctgccaaccctgccagctctaagctaccatttatctgtttcctatctctgtatatttccctgcttaagacatttcacttacacaaaattacagaattccatttgcctgtttctgcttatttcattagcataatatttcaaagttcctccttgtcgcatagagtacaactttattcctttccatgaccaattagtattctattgtataaatataacatatattatttctgtttacgaatgcatgagtacttagattagcctcaccttttgatcacataaataattctgttctatatatttaaatatttctactctataaatgtgtgtacaatataagttttttgtttggactttttttcattttctttcgtatatatactcatgattgaaatttatggacctgatataactctgcgtttaatgatttgatagccatttttcaaaatgactatataattttccataccaccagaagagcagggatgctgccatttctctaccttaatgtcaacccactgacctaattagttaatgttgattctgtcggccttgatatggtatctctttgtagtctttatttgcatttccttccagtctaatgatggcaagcatgttttcatgggcttaatcatttgccatttgtatagttcatcattctctgaggcgtttccatctaagtctattacttggtttttaatttgtctttccttactgagtttaaagtcttaaacttacagttctatgtatgtgttgggtaagtgttgtctctttcccagaagagacagacaaaaggatgtttggcagactgttcagtatgatgtgagtacatctgtctggtaggaatgggtgtgcatgtgttgctatgctctcaaactcatcctagatcctatgtacactcttccttgtacttgatgccacgggtgatgccttccgttcccccacaccttatcaattccactgtgaacaccacatgagatgaacattgaatttcagtcccacaccgtgagagttaatttctaaaagagatgggctgtatcttagtcatttcatatcctgcctattttatatgctatttagcaggatttcagattggagaactatgtcagctatgtctcttttaaggcatgattttagatttttattcatgtacatgacaaatattgtggtaaatattcagtgatctggatgattctgcatccagctgtgatgtatgaaggtatgacatttgggagatgacttgcttcttaaggtaactcttcaaaattcagattagtggcctttgtaaggatatcttattgtgctagatggtcctcttggggcagtgggaaattggttatctgcagctcaggcaagggtccttattagaactcattatgctcacatcctgttcgtggaatcacggcctttgtgaaaattatttttctgtcatttttaggttactcttgtagtgatagaagagcagataaatatcgggtttttcaccaaagagcccttcataaacaattcacacactccaagtcttcattctcatttggtctacattctcttgtactgtggctatcatggttataaagtgttagctgtattatatgtaaggttggaaaaaatgttcttaattatgatataaagattatgacattgacattttttgaagtacaacttcagtaatagtttgattatgaataaaatgggcacaaccagagcaatatctaatgaagagtaagcaattcctaatgaaaattaaggctaggtgattttgttcattccattattaaatactcttaacaaaaatcatcatcatcaacaagaacaacaacaaatctgacaaaatgtattgaaattctcacaggtcatcgcagtttgaatttttcttgaataatcaatgtgaaaaccactacagatcttcccagactatctaataggctaaaggtttggaagcatcaagagcaactacaagagtttcaaaattaaacctagtatttacctaaatttagacagtaaagacaggtgaagattctgcagtatcagcagtaaagatataccagtttagttcatgtttaattgcaacttactatataatttctatggaaattgcctgcctagctaaaagttgttttttttttttcacagttaatgggtatagccaattacttgttcttgcaggtcagatgcatgaatacattctataagaaacaacatgatgccattgtaatcacatcacagaactgctttcctgctaggaaaaataaacatggcacttgttagtttgcatcaggtcctattcagaggagcaggactgagaataattagttcaagggatgaaattatgtaattcaatttttcctcctgtgtgctcctactgacatttgaagagttagtgaatcaactgctgggtgttcagtaataacactttatcacaaacttacagtgtgtgaaaacaaaagaaattttaaatagctggggattttgtgtgagtgtgctttttccaggatccttagccagatagaagtggggattgcacaaatagtattacacttcttctttatcatggtaattgagcttctcagatactttgggaattaagaccacacagagttattatgcagatatatgcagtaagataaactggaaggagggacactttcatagttttatttttaacataataataaatgaaattttggcttcagcttaccattcacctcgctgttatagcagaccacattgcctcccactgcatgccttttgtttttcttttatttgactggaagttttgtggatacattatgatgatcagaatctcccctaaataagaaacagttttagactatgactttaatactgcacacagtctctcttcctgcctctatgtttcctttgacacattgtcatggtatcccgatgttcacttgaggatgttgggaggaaaaatgtgtgaatgcatcaccagatcattaaattttgtctgataggccaatgagttgcaatgtagattaggctccaaggagtagtgttcaaggaagctctgattccacacctgaaagagagaggactttacttaagtaatcttctttacggtatctcttgattaatgatggaaatgcacaagtcacaatgtgttctttgttaatctgacatgttcaaattggaagaatcttaccatagtgatctattgatccatcttttaattcccttgcattttttggttactggtgttattcaaactaaaagtcacaaattatcaggtctcatatagatcttatgtccataaacatgattgcttaccagaacttcagggattttaatgctaccttatattttagaatagctcaagaaagagagaatttgttataaaaatcctattggaaatgaccctgaggatagacagttgagttgaagtgagtaggatttgtcatagcacatatagtcactgacccaaagttatgaaaatgaatttttgagtgatattaatgagagactaagaatttgtttttgtggttgaatgggctgtatgacttatggtttgacaggaaccatggtgtagtgcatatgatatattatataaaggtatgctattaaaataaaaataacatattgtctttcttaaggtaatttaaaatgcttaataacattatttacacataaaatactatgaaaaattctgaaattgcaagttattaagaaaattaccagaaaaattaacatgtccaattaagtcagtttctaatcagaaaaaaataaacgatgattcacatatataacacatatgaaatctgtcaaaaatcagtaaatagagctttagttcatgaaaatggcttctttggataataatatatgaggtgcaggcatcagatttaagacctctatttcatattccttactgtaaatccaccaaagcccaacctttaagatctatttcaaaactgccaacacctctgcattctaattcccaaaccctaaatctggcagcacccatctgttacctaacctgtcaagttactggttccttttaatttgtatttcttccaatcttgcttcaccgtgaacccgacttcattcatgttgatcagaacatgcatgacccttcttagaacttaaaattttcttgacctttccaatttccttaaactaaaatctttacacatcctacaaatgcctgtggaactaatctttctaaccttaatgactttcaactttatcccttaggtgctggtgatgtggatcatgcatttttttaaaaaaggacaaattattgtggttcctatagtctttgtttaggaagctctcaatatctgaaattctctcctagcctttctcaagactgagttttcttcctgtcatagcacaaatactgccttctctgggttatattattctttatctatatattatttttatctaatgataaactaattacttagaattacttcttcctctgttctttgtctttcatagttcgtaagataatccattttcatctatctattgcattcattgtcatttgctgattccagtgaattgtcaagtacattgaagaagagtcctcatgactttatagactattatatccaaacctatctgttgtcttaataacatgaagcattcattgtacacactgatattctaataatttctataaattggacaatatatgtgataatactgtatataagcattctgaaacagtttctctaaagatgagaatgatgctgttttcatcttcatttatgtctctgaaagggaggaaattgaaatttactatcatttggaacacagtgtttgaggtctgtgtgaaactggtaattaaacttgacacacttgcttctaaacacctgtggataaataatattagcataaaagcataagacagggctaaacccaagtaagaatgttatcaagctatagagaatagtaacagtgattaaaaacatgtattcccagagaaggtgcaaggccattttaacagtaatggggtatctcttaagctttttagaatatgctaaagatactcaagcatgttagtagacagtcacccaaaagcattttgtgttgctgcatgaataggtaaattaatagatgattcatagctatgccaaaatagcctggaaataacatgcaacatatgatgataaattgaaccactatatattatactaccatttgtttataaggaaaaatgctgtctaaatccaaatcaatcaaccgttgaaaaccttctagtacactagaattgcactgcgattgaacgagtcaactagctagcaaaaatcatcattctcaagtaaggtggacaatagagctgtgtgatttgttcaatttttaatagaactaatcatatctttgcatttgtagtagaggtcaaaattctgtatggtacattctaatgatgcttgaaggatttacagagattattaatggagtaaaataacaagagtaggtgagactttttactgtaaaaaaaatcaatgaaatagaaagaataaaaatgaaattcatgtccttgaaggatgtaagtgaaaccctagtttctttaaaacattcaagagtatactatcagaagaaaactcctgaaactaaaaagaaattttaacaaaaagaaaaagagaaaatagaaacagaaagtgttttattatttccctgacaatagacatactcttattattttccagaagctctcaagccaggaagataatcaggaaaaaagaacatacatatgaaaatgaaagtattgaatactctatttcttttgttatttccattgaaaggctatcaaaactgttttctacacaggattggaaatctatgagcccaatatatagatgtggttgaaacacaaagcttagaccctactcaaaacctacagaaaatgaaactagaagccttagaaccacacgtcttttttctgagtaactctgataaggaaacactgggttatattatataccaaacactatttaatgcacggggcataactcaatctataactataatcacttagacattgatgcattacagaatagcatggtatgcaggattatatatgtgaaaaacctaaagtattatttccactccatcctacattaatacagtatatttaagaagataggtaagttatgaaatagattctcatcaagtttcttgagagcatttaaagtggtcattattagctatcaaaactgctttgatttcgacagcaataaaagtacttatatagttaagtgactaagttattgtattccatcatctacaaatggaaattactcacatggcctgcttcacaagctctctcccacttttgaaaactgggaagccaaggttcaaatattgactatggccattattatttattatttattattattattattattattattattattattattattgttattatcattatgcattttggctgccaagaatgaagaaatagattaaatatctgtacaaaaattccaaaggagcaagtttggaagaatatactaaatttctttgaaaagtagaagataagcactttaaagtttttgattaatcctaattacaaattaccaaagataaaatgcagctttttctatagggaatgtgtgctatgtagcattagtgtcctagcaaatcttattctatatttacctgacatttctgaatatctgagtttatgatctcataagactcaatatagaaataacctcttctaggacacaatttctctcttagatttatttaataatcctaacttcattattacatcaattacatattttcaagtcaatatctataacaacaaattgttcctatttttattattctttgtcctgttggacagttgtcttctgatgtactgaaatcttcccctttacccatctgtggaataccactgatcaatacctggattacattccagcaattgatgaatagcgaaattgactgtcatttatataaactatgatggaggaaaagaaacttatagcctgctttctgtactgagctattgacacaatagtgctgtgtgaacacctgctttaaaacttactgagttacagcagcaatcatttaccctcaatatcatgattctccgggttgatggtaacttttgtgggtatagcaactgagaatccagcttagattcagtcctgttctatggacttgtgaaaggcaaaagagttctcagtgctactgctaagacactctttctgtctcatgctgactgcagaaaggacaagagagtcccattggataatcccatgccaagctccctcacactctgtcttttatcatgtttgttgggcacacctgaaatctcagggacagaaattaccttctaggcagaaattaccttgaaaatgttgatgtaatgaagtgcaattcaaaattgaatcgagagacataatggttttgaaagtgagagacttacttctgatgagatacagaaggaaacacccaaaaggcgattggagtgcacttcattcaggccacactagttctggctctcctgtgtcatttcccagcatagcattcccagctataccctcccccaattgacaattaccaagatgctctttttactgtcttatctctgggttagcatgactgttcataaatagaccttctgggaattcaagtacttaggacttttattaatatataaattaaaaagttatcacaaaagtctttaaggtatatacttcttaatattcacaaagtaattcacaaaaactgaattatctaaaataatgtattctaccaggagccttttagaaaagtatatgttgcctttaagtagggttatgtatttctattaagcaattcttcataatttccaaattggagtcatagctataagcaggacaccctggctttaggttccagcatggtagacacaagtagagaaattgtagaatttgaaatcagaagagataaaaggaagactggcctagtgatacttttctatctacttaggaattttatgtgaaagctttcacacagagacaccttattacatggccttattaccacaggcagcaaattttttcctgtgtcagagaggcaaatgagatgttatcactctattatattagtcttacgtattttacttttaacttagaatcttccaaatcccaaatcctgtagtgaaggtgtcacactgtatctagtctataatagttctcaaggttttgctggttctctttaattatcatattaataaacattatcttaattaggggctaacttctacttgacccaatgcttatcagtattgtgtcttcttaaatcttacctgatactttgtcctaaccatcccccagtttatagggaacaaaactatgacccttagagctcacgtcaattgcctttctctcacacctaagcagtagctaaatcaagagtaaaaatgagctcaactcaaaggcatgcccttgtttcttattcaaagctgtctgcactcatgacatttttttcatctttgattcagggactgtcaccaattaaaactttcaggcactcagttttaatccctgatgtgacaattgccaagacctatctgttcagttgtaaaactatgattaatagtccctgtcctgcgcaaattgtttcaccgctctgaaatttcatgcagaaaggagagaggtagcccacagcacaatctcccgtgaatatgttgtcagtaccaggaaactctacgaccactgtaatgacttgtttgtgtggaacactaacctagaagagtctttgttttgatttgacatttttcagtactaggcaaaaagaaagcacacattaagaaagtgggaggaagcgagaagaaaggtatttcttagaacagactccattgcccttcctactatgggaagcatcaacccaaatggaaccacaggatgtttaagagcaagaatgccagtctgcttgtggctcctatgacttgtttcagttccctattagttgctgacatgttgcttctcagaataagcacagaatgagggatcataaggcttgaaggtttctatcatattctgtcttctttgtcctaaagagtttactggtgtcatatggaataagagtggacctcagagcatttcttactgagcctctgagcctggcatggcgcgagtcaaggacacagaagatttatattctctgaaaaatttagcagtactaaattttgctttcatatccaaaacacttcatttagaaatttgcaaatgacaatatgaggtatttatgacattctttttcaaagcctcctctccagtttcaatttcaatttgtgtttataccataggatcaagaactagaggacaaacgtcccagctctaataagaagagacatgttaccaacttaataagcatgtctgtggatcttacacaagcattctggttcctgtgggcacagctgggttatttctatcctcaagtatattaagattttcatatcactcagatttattcatgggaatacgatgatatttgcattaatgccatgatgcttttacatatttcttcattagtagtcctatattgtgagtttcactcactttcatctaccagttatccccacagtacaatctttagaggaagtttcccaggaacccgtttttatggaaaataggttcagattctgatttctgtttttcagttctatctatgctaactcatcaatgatcagcttacaatctcccacccatgtctcctcagtgcacctcaccaatcatgttgttgttgatgatgatgttatgtacactcagttgaaatcattaccatgtccccaacaaatatccaggctaatatcagtgctttgacaactgaatattatttaaattttcaataaactcacttagataagacttatacactgtatgtacctcgaagaagttcaaaatctttttaacaagttcctggaaactctctgtttcactgtatggatagcaacacacgatgaacaattcttttcttggattttaactaacttaaagaggctaattagcttttactttaaaagttcaaaattttgctttgaagattttccttctaggggctcctcttgaactcccaatgagctggaagcccctgcctgctgacctggttagatctgcatcttgaagggtcagctctttgtcctcacctgcagtagacagggccagcactagaaaaagcatcttagtttgagaattctgatcaaggcagtttcacccccatgtgctgcctctctagagaaaatttgtttgtgtgttctttaaaaataaattggtatttatgaagcagtgtgtggattcctaaggggaaatatttcaatgaaaagtaattgagcagtgtaggtattttaactagtgttttgctattttacagatatgcagtgatatctgcaatagtattatgattagtgttatatacttgttgattatgatgtaaagtatcattggaaatcatataattaatactactaatgttttagataatcatatatgatcatctcatgataagtaaaagttattgaagtgctgaaattttcagcacaaataatgagaaagtatgtttggaaggcaggcagtgtagatttgcctgtaagataaaaatcattcgtggccaagagcttagtactattatatcaaggatgactttgtcttaaagtagatcaaatatatgttttggccaagctcttttgtctgattttatttgatgctgactctgtttttcatatagtgttctttttcatacttaagataggctctgctatttccacttttgtctatacgttatctatgttctttgtccttattctaggagatagttttccttcacaaaagtaaagttctaaagtcactaaagagtttgcaaaaagttaaacagtatttaaacaaagtgtaatgcttgccccaatatacttattcacttcctggggacagatattcctatgtttcttgtatctttcccaatcactaaattctatgacaataaaaatttccccagctccatgttcatggaaaagccctgaattcaaagtttaaattgcagctgtggccccaggaacaacttactaatggttcctgttccttttatctcctggacctgctggaatattgtatcgaaggagcatataaaagcaatgagtgagggaattgaaccattctaattaaagctattacagtttttaaaaaatacaatgaccacctgctcagctacatcatgctcttcagtctgtttaggtttaacctttgtagagtggaattaattctcataaagaggatcaatttgctagcttatacattaacaagcatgtttaatcagccagaagtcatttatcacttgttttgaatactgttaggtttgtcacttcgacatctcaagtttctctaactggtttgtgttatttttatctaagaatgagaaattagtctttggcttgacctatctgagcaggacccgacaatcctcttcagtacaagtgtctattaagtgttaagtgaggtcataggctgatgtttgggttacaggactatttcatagtcattgtgcagacattcattctcagcactttaaatggcagacagaactggaaagtctctccattctcactccctgccccctgtggcctcctccactactgtgagagctatgtctaacctcagacatcaatgaggccacctccactactgtgagagctatgtctaacctcagacatcaatggacaggatcctgactaatgcctccgggcttcgtgtctctctaacttggcccagattcttacacataatacattcagtgatccctgtggagttcaacttatacccaccagttccatttgccagtagagtcctaaagaccttctagagtggctccctaccccttctgctgagccattcaaatacagcacaaagaggaaactatggaacttatccatttatataactgaccttcaacgttgcctgagcaaatgattccagctatatttatattatcaaagtttgggttacagcagacagaaaccttcctcctatgcagttatatttaccacacaaatttgtcaccttagccaaatgtcagtatctttggagcatatatttgggctcattgatctaatgggctcaaactctgtgacagttagagtctggacaccatctgactgatcactaaataaaggtttcttacagaaccaacaaaatgctttgtccacctcagaccctagtctcagattatgaaagcacccctgtgctgttttgagtattggcatgtttccatgaacgttcaatggtgggagctgctgctctgatgaactgcatgactcaaatttcattatttactctgagaaaaattatgggatccagggatcctgagatcatggatcagtgtgtattctactgctattgtcttagtctttgttgtcaatgaactccctgctagtgaaataggattagaccaggcaacaacttgcacaattctaaggaatacttgaaatgaacaccatccaagtgttgtggaaacacttgtgatgtacacgctgagaaatggcttatgaatatgaaacagtgtatgatgtaagaagagattctctatcgctagtgcttggtttatttggataatgaaataatcaaccttttatggcccataaatcttgcctgcttcatataatgctgttttttcattttgtacatattgcatttaattttaggctgatgtctattgtgctgtcaacagactttaaagatagcttttagcaagttaataaaactagacttttaatactacatttacacaataatgaatatactttgtagattaacttagtagtttaagttgtagaagtataaatagtataagtactatataagtattataatgcccgtttctctctaaaatattaactaaatacaggctgagttaagcctgcttccatgctgtaactattttatattaataatatgtaccctccattttctcatcatttatttatttatttattttggtttttccaagacagggtttctctgtatagccctggctgtcctggagctcactttgtagaccaggctggcctcaaactcagaagttcacctgcctctgcctcctaagtgctgggattaaaggcatctgccaccactaacagtcactggcaaacacagttttacagacccatagtttcacatttcctagaatgttctacctcttcatattatccttagtcatacagaagttttctttatacttatttaagctcgatatacacaatggtttgtttatcattttatctgttgaggaatatcttggttacttcaagaccccagcaattaaaatatttctgtgcaggttattgagtgaacataagtatttgattcatttgagaaaatgtcaggggacacaattgctgcgtcatattagaatatgtttaatgctattaaaaattgttagcaccgctctctcccctgcacatatgtagcagatttgaagttccatcttattgcaggtcctccaacaactggaccctgtccataaagctatttcctatctgtggaatccattccctaactaggttttcttgtctagccttagtgggagagtatgtttctagctctgtagaattttgatgtgggagagttgcggagggtacccagggaagtctctaccctctcagaagagaagaggacagcagcatggggggtaaggaccttgtgagggggaaatgggaagggagtagggagcaggatataagatgaataaataaattaacagtaaaagtagttaagcaattgtagatgtccacatcattttatgatacatttttattctttgaacgttcatgcatttatacagtgtatagtgatcaatcatattcactcagtgttgcctccctctaagtcccctgaatgttcccaccctgtctccctcaaagcttcatggtttcttttttcagtttttgatgttaataactcactgaatccaaggagtgctactcatacacacatgcatgtgtgccggtccactggggcacgagtggataggaaatgccacattctctaaagacagtgccttgctctttcagaggctcttccctgttagtgggcctcataaattcctctcatgtctatgccagaattctgattagcttgttcttgtacaggtcttgtgcacacattatagttgctgtgagcctatgcatatactaattccacatcatgctcagaggtctgcctttcacaactccttccaacaaattcccaaattccctgatttattttgcacatgaatgcccacttttccagtatcatttgctgggaagaccatattgcctgtctttctttctttctttctttctttctttctttctttctttctttctttctttctttctttctttctttctttcttccttccttccttccttccttccttccttcctttcttttttctttttgtctttgatcttttgtcaagtacctctcgactatgttcatgtgactttctatttttgagctctttctctcctattcctttgatctatttgttattcttttaccaatatcacacagtcttaatatctgaaacttgtaggctttgaggttctgtggttccagttagctgattttattcttcccctttaatatggaggtcaccatgtggcagggcacaacctttaaaatcactttattaatagtgataaaataattttctgcgatttaaatggaattactgacaccctggaagtattcaaatattcattgtcttacctatggtcagacaaaatagttcccttgtttaattctttgataacttctgtcagaattgaatgcatttttggtataagtttaattggtaaagttgtcagttagttatgaggaaatgctttttatttaaatattagaattattattcatcacaatgaagaacacatgttccagcaggttgctatataagtacttttaccaattatattcataggtgttgtagagagaggaaaaaagaacaatttaacaatcaatagagtgtgaggacatattcttcaagcaaaaaagatttactggtatagataaaatggaaatatagatttattatcttttatatgctttatgaaaatctcaatgaaggcctactattgattattcaatttttccagccattagttcatctattaattaattaaatatatatattaaaagcctatcacttaccaccaatatagttaattacatttttttcggggggggggggtgtcgagacagagtttctctgtgcagccttatttgtcctggaactcactctgtagaccaggctggcctcgaactcagaaatccgcctgcctctgcctcccaagtgctgggattaaaggcatgtgccaccacttccctggccccacatcaattacgttttttgaagaaaaattttattactgattataaaataagaacattggaaatagcacaattggtatttgtagaaaaattattattttaaatgtgtatttatatatttgcagacaaatacatggaaaatataatattaatattttcaacaaatgtttgtgaaccaactacaaattgtcatgttcctatggtcctggtttttaatcacagtataatctagtcaccatagagatcacattgagcataaaagagataggaagtacatttgcacagtatctttgaaggatatctgttttcactgatgggccttagtagagtccctctaggatatgcttttcttgtagcaggtcagtattcatgggaatgcccagaataaagatatgctatatgaagactagacctgttccatgagccaagggctcaactgaaagcagctaaagctgtaaaatgaggctgaattaaaaaattcagaatgtcttgtgaatggcgttatacacactacagttaagagcaaatgggtgctgcaatatggtggtcgaatatgagtgttataccaagataaattactaactgtaactattcattctcctgtaaagaatccttggggctaatctagtccattctatgcttctatagcaagatacattcagctggtgccttataaaggaaacaggcgttagtttacagatcatactacactttagacttccaataccatggtaccagcaactgtcatgagcttcatgctgcactacagcatagtacgtggcatctcatgataaaagtcgaagatggcgattgtgcctttggaaatcagtcacatccagcttcacaaaaattagtctgctcccataccatgagagctaaacttgcctaaaagtgggatttgatgccctaaatgccacctggaattttgttttgttttggggactggatctcactgtgtacctctggctgttctggtcctcactgtgtagaccgtggtggttatgaactaacaaaagtcgtttgcctctggcaggcagataagaaactttagagtttctatttcctctcaatactgtgatatggagaaattgcttctagcacatgaacctttggggacagactctatacaagcctagaagaggaaaggtcaagataagaaacaagaccaatgagattcttggaattgagtcaaaacttcaggacttaatgaattaggataatggtgtggagatgaggtccaacatagaaacaggctgacagtgcagagggccgaggtttggactctctggtaaagatccttctttaagtttctgttaagtcaccttctctgttttgaatttttgttttcattttcatttttctgcttttttattctgtacataaatgatagtttacatttctcctatccccatgctattttgcattaatgtaccctatagtttatttagtctgcctggctctgtaatcctgatgatgctcatctcaattatgtgggatgctgacattccttctgtttgattatttctgtaataccctttagtagcaaaaataacgtcgcctatatattcatgtcagccatttatctcacatctaaaatattgcctagcatgtagatctatgctttctaattttatggacaaaatgactaaatggatgctgacaagatttggaatttcttgacttctcgtcttggttttgtcctttgaagacacatttctttacatttctgcctaattccacatcataggacaagttgcctctaattgtctcccttgagaccaccatgctagcaactgtgttgctactctgatgttttcccctttctaatatgtaagaatctcacgtcacagcatatgtatgagcccttccatctgttccctcactgaatatttctacaagtgtattttatctagtattccagattatcacaggtgttaagtgctgaacttctaacagaccctatgtgcagaagtcaagctcactcttctgtcggcagtcctgcctttagctatatgatgtcatgatttcaatcaacacaagctaacatttgttattagcattgattatgaacaatgtaacatggaaatttgtacttgagaagccacagcaatatgctacatgaaatgaatgtagtatctttgcagcaatgaaaaatggcttcaagtaattaagtcttgtaatttgaaatactttaagatgaaggttgatattaaggtggagaacaagcaaaaaagaatcaatgaaaaaatctagtagtcatcaactgataacccacatagaagcatcaccaataaatatcgtcatatgccaacacatttgaaacacaacagacagtttttgtggctttaggaatttagaacaaaaatgtgtgaggattacaactgactggagagtcagatgaggagcagggaacatacatgattctaaacaaacaaacaaacaaacaaacaaacaacgagaaagatgcaggcctgtatggacatgaatgagtccacctgtggatgcactaatctttggggagtattcaagtattcagttcagaagttcaaagaatagttaagtgttgtcaatgatcaacaattttctaattaaatttaaggcatcccaacaaagggaactatgtatacataatattggaaacctagcaaattgtaggtagagttactgaagttattgatctttgaagagaactcatcaccataactttaataaaccagcataatccctagcgtcctcctaaatattcacctcttacccacagaaaaatgtagccctcatccgacatcatgagaacttctcagggaaatccagacaatatcagggaaggacaactgactcaacaacagagttgtagaccccagtcccaactactacagcctcaacacaactttgtacctaaagctagggtaatattgcataagatggggcagaaagattgtagaagccataggataagggactttactatgaaattatcagcatgaaatgtcagagatgttaaacccataaaatctcaccaacatacttgtccatacttgtctcaagaaagtaacatgccaattaggcatgctaacatgaaaaacacaggagttctcaaccttagataaagagctaagtaatgctcagaatgagaaatagtcttccccagtgaagagcatatgatttggtttattcactactagatggtgagccttcaaaatatattcataaaagtaacattatatggactgagaaaggtgtgtgtgtgctcacgtgtgtgtgtatacacatttgtgtgtgtgtgtgtgtgtgtgtgtgtgtgtgtgtagcaacatctaaacaatagagggccatgtatttgaaagaggaaaatgggaaatatatgggggtcttggagggagaaatcagaagaggaatgttataattgcaaaaattaaaaaaaaatatatatatatatatataataaaagtgtttcaagatagaaggggttgaaggttattgctttagtttaattcacatggttaagctatattcatggctggaatagtgacaattatctgaagtaaagaatgtctataaatacctttactttgggtgggtaggtgggtgagtggggaagctcccttatagaaccagtggagagaggcatgggatagggggtttgtggaggggaagcctatgaaggaagataacatttgaaatgtaaattaataaaataaccaattaaaaaattaaaaaagaagactagaaaacaatgaaatgaaaagggtaactatgaaataggcactatatccatacactgacctctaagacataaacagtagatatgtgtttactgtatgtatgtatgtatcatatacacaaccatatccacctatatattcatatacatttgttaggatgatgtattaagatgtgtgtatactattcagctgtcaagactaagaagtcagatgttcctagcagtggtcataggggatttactgattcctaagctggctgatatttcagtcccacaacactgttagagagtaacaatgttcacccagcattttccccccttttctggcccatttgagctcttagctcagtcccttgtattatatccttataagtgttatagaagttcaaatttccatttgaaatttctgtgggtttcacaattacagatatttgggtatttgtttatttgcatttatcagagtccttatagtgttagaaaatgacagattaaggaaacaaaaattctattaaatgaatatccctgaagccttttcctataattaaaatttttaacattttaataaattacataaatgattgcttttacattgccagtagaaacagcttcccagtctgggttttgtcactaatttctttgaagttttacatttttagtgttgctttaggcttgatatttcctctttgctaattggtataccttgtcccctttttatttcaactcttagtaatactcatcatttattctgtaaacatcattgcaaaatttacactggctatcttagttcattacccaatggttccaacatcaagtggtatcttcaataaggaggtaccaggctgcagctattctaaagaaacaaacataaaggctcaaagcacaggcaacttaatgatgctttgttgtactttcaactgctgtcattaacaagctaaatttagaaagttatcattattttctccaattattcatttattttaatatctccctccaaaacaagcaaagtcaattgctatagactgttcaaaataaaaatatttttctgaatgttattgaagacaacgaagacaggcatgaatgcattttagttgtaggaatatcattttgtaatattaacattttagtaagactatatgtatgtcccataatgagattcttggtttgtcaggataaactttatagtaccattcgatcccaacaaacaagaccaatagtattcacaagtgagtagttatattaattggacagagatctttcccaaagtatctgtatcacaaagctgggtgtggtggcgcacgcctttaatcccagtgctcgggaggaagaggcaggcagatttctgagttcgaggccagcctggtctacaaagtgagttccaggacagccaggactatataaagaaaccnnnnnnnnnnnnnnnnnnnncgccccccccccccccgccaaaaaaaaaaaaaaaaacccaaaagggaatctgtattacagcatattttttcttttcttttctttttaatttaatgttttatttatttatttatttatttgcactccaaattttatcccatgcctctggtccaccctccaactgttccacatcccatacctcctccccatccccctgtctccatgaggatggccccaccaccatcctccagaaggatgtctccacccaaccagtcctctaaactccctgggactgccaatctcttgagggttaggggcatcttctctgactgaacctagacctggcaatcctctgctatatatatgtgtgttgggtgcctcatatcagctggtatgtactgcctggttggtggtccagtgtttgagagatctcaggggtccaggttccttgagactgctgggcctttgtaagaattgtcctcctccttagcttcttccagcttttccctaattcaacaatagggttcagcagcttctgtcctttggttggatgcaaatatcttcatctgagtctttcagctgcttgttgggtcttttggagtgcagtcatgctaggttcctttttgtgagcgctccatagcctcagtaatagtgtcaggccttgggctctccccttgagctggatcccctttgggtctgtcgctgggacttttcctcaggctcctttccatttctattcctgcagttctttcaaacaagaacaattacagctcagagttttgactgtgagatggcgatatcactgcatacttttcaattttatggtgtgtgttaaagtgggtggggtgtggagcaggggaagggggtggggggataggtgattttgggagagaaacctaggaaaggggataacctatgaaatgtaaataaagaaaacatctaataaaaatatttttaaaaagaaatgagaaaaataaatattcaagaatttaaaaaagaaagtatttacttaacagagatcataaattgttttctaggtgaaaggcaaggacttgaatttttgtacatacacatacaaacaaacaaactgtgaagtgcagatcttttaaataataaattgtcttccaaaagcaaaaaattgtcactatgaaacaatggtctgcaaatgaaccaggagggggatgagattatacataagattgagccaaggaccatgacaaggaaagtatagaaacacaaggagaaaatattctcatcgtctgtccatttttaccttgtaaatacttgttacaaagataattctgatattttaagactatcttaaacaatgatgtttttctttagaataatttcttagattatctagaatatgtcatcaaatgcggttatttctcctaatttttgttttgtacagattttcaaagcatactcaggggtgttgtctaagtcagggtgctcactccatggctgcctcctctagccttagtgtcaaaatcagtgtctcttctttcttcttaagctgcagctcacatgcctacagctttctactatagctcagatcctcatggctcctattttgagcatctttcttagtttattctgggtgcccagttagtccaggacaatctcgctatatcaagatccttagctgaggtaagcctggtgagggataacggcagactgagtactgaggacaggaggttggaggaggagagacacagttttgaggctctcctgaggatatggttaagagtctgtctaaaaacaagtgaacaacaacagcaatgacaaaagtggaaaaaaggatcaacaaaactaaactttgctttccaaaacataatgcaaaaatgtatggggtgcataaattatactatggatggtaccacgaggttatttcaaacattgatattttaaacccttcaacaagcattgactcattgaataggttttataaaaaaatatccttgggatgaaagcctgattcacaagatggaattcataaacttgcacacttattagcgtcatgaacctggaactgagtagacaggtcatagccctaggggagaatccactaccattgtgtctctgatggaatgaaatgttaaacccattctccatgacttgatattatatccatccagaggtaaattcatctctcaaccttcattatcaaagcttcttttggtagatggtaattaacaaagagatgcacagctggtcaaggtacagaccatagtgattgctgaatgctcagccttaacatttagtatgttatacctctcctttcaaggcttagcaaatattaacaaagggccagaagagggagaaagctcaagtaagcagtgtgcactcaaaacaggcctgaaagcatgcacacagtccacacatactcacctcagacaaaattccagcctacagagcagagggagcttaaagtccctcccctggctgagaagctgttggtaattgatagctgttggaagagggacaggtgactgtttttaacagatgtggcctctggctggtgtaacatgcttcagtggaccattgcacacctctgagtaaatgagcagacaaacttaacgtgactttatgagttgaagaaaatgaaaacacagagttatgatgagtatggatgagtggatctgggaggggatggggatgaaaatattctaagtatgatgtcagaaattcttgaagaattaataaaaataacttaaaaggaaaaggttacttgggaagagatcaaactcaagaaagaacagagaccatgtgctcttctttacagaaacgaacaaaaacaataaagcagagaaagagaaaagtggagatgtttctgcaaaaacttttccagtagagtcttcttaaggaagccagatagtaaacttaatccatgcttctatgcctggagtatctctacaccttgtgtagatacagcccatggccttggaacatggatttcaatatcaggttttaagcccagatacacagagagaacaatcatgactatacctgttggcttctagtttcttattcttaaggaaatccagttgtttcactgagcaccttgagaattaaaggttgttctggttgttggttttttaaaaaataatgttattctgtaatcatgattagaaataagctctctctgatgtttaaagtgaatggcattatgtcataaataactcatatttctgttgtgagatcctctggtcactgaacagtagatccaaatctggcaggcaggtttcctgcctctctaatgagaactctttctgctgaattcattaactcactaatttgtacttaagttcacatagtactacaatgtgcaatgttcccatgagcatcttctttgcttaaactagttaatccgagcctggagcattttgacatgcatttgataaactaccctggcgcccttggatctgtggggagtcatagactatgatctcgtttgttattctgagatgattctttgcattgtgaacaatcttgaaaacacccaagaaatgttgcaaggaattttttttaaatctatggtttgtctttctttataaataaacacttccattggaaccttttcccttgcctttttcaagtcaagatttgctatgaggcaataagtttgcttaagcaagagaaggtattccatgtccctgaataaagagatgtaacttatatactctgaaaacttgaatgattcattttccaagaacaagtggaaaggaagcacttatttattcatgctttataatactcaagagaacattatttgtgctgttgtttttttaattgtttaggcattccctgtatttgaaaaggccaatggcctgcacactgtcccttctgcctatttgtacccagtcccaaatcatacctcttttctatgctggatataatgtgacccaggagccttggtcctgggttctgtaccatatatgatctccgagtggctggtacctataggattgacctagtagaaagaaacagaaggtgctgttgaagctgtcctccaatccttgcatagctgaacactgcactggtacattctagtcatggggttccttctctttggttccagccttagctatgagaaggtcagagagcagttttcctctttcttttttttttccatttttattaggtatttagctcatttacatttccaatgctatccaaaagtcccccatacccacccacccccactcccctacccacccactcccccttttaggccctggtgttcccctgtactggggcatataaagtttgcgtgtccagtgggcctctctttacagtgatggccaactaggccatcttttgatacatatgcagctagagtcaagagctccggggtactggttagttcataatgttgttccacctatagggttgcagatccctttagctccttgggtactttctctagctcctccattgggagccctgtgatccatccattagctgactgtgagcatccacttctgtgtttgctaggccccggcatagtctcacaagagacagctacatctgggtcctttcgataaaatcttgctagtatatgcaatggtgtcagcgtttggatgctgattatggggtggatccctggatatggcagtctctacatggtccatcctttcatctcagctccaaactttgtctttgtaactccttccatgggtgttttgttcccaattctaaggaggggcatagtgtccacacttcagtcttcattcttcttgagtttcatgtgtttagcaaattgtatcttatatcttgggtatcctaggtttggggctaatatcagttttcctctttctatcacttcaagcctttgctgcaatcaagatttctctttatggaccacagtctccacagtgccttatttcagtccacacatgactaactaatctcttcatgaagtgtccatgtgaaagacccggattgagtttattttctgataggtctaagtcactgacaggtgaaatatgcctattgtgaaagagaatggtcaatggcacatgagactatttatagcttcttgtgttttgatattttatggtcatgttctttcagtgagttggacctcccaatagccataatgggtagataagaatgggttctcagatgcaaaattaccaaatccttttgaaattcattaggtcactaatttttctctagtccagtatttcatatcactttcaggattggatattgctggatttaataatccaggtaatgtgaattaaaaagaaaactatataatttatactttagctgttgagacaagagtactccttagtaaagagcatgtcctagccgcagtttcgctccacatttttttaaacatgaaaatctgtgttccttcatggatttctttatatatgtagcgtggctcgtccaaagctctctgtagactgtttcttcaggtggtgttagctgagtgtagctgaccaaggatatcaatgttacttatttgactggtgggtaattttcttaatgacaaagttttgacccaaatactgagagttccctctttgtcaatacatccaaatgtttaatatgcatatagctttggcctggatttgtgttaatttttaaaattcagtgaaaatatattttaaaatgcaattgtgaaattttgtctgcatttcatgtctctatttttctaagtatgaggctctttttttaacgtccgatgatgctatgcttcctcctgaatttactcccttgatgtctgcttttattttctaagttttcagcttcattttactatttgcctataacttcaaaaattcgaccctctatatgtatttaaagaagatagaagtctctgtcttaggtaaataaataaataaataaataaataaataaataaataaaaataatggattttaagagggagggtttgcaacagcagtttagggcaatgtcctaaccattttaagaaagtaaatccttagtcatggtgtgaagctcatggtggtaccatatggatctgtatgttttcagagctgtttaattcacccaaacctagaacttagttaggtctcaattttactttgtttgatagtaattagattcctaaaatgcccccatttgtagctattgttatcaatgtaaacagaataaaggggacttaggcaggcattcattatattcatttagcatttattagctatgcacagtagtcagatagttgggaaagactttttgttctgtaaatattaattagagaattgtttgggtctcttgctgtcacctaacctgtgatattaaaaggcttttactgaaggggctaaagctttagagtagaagttattagagtaatagcatgaaggagttccaagaggtcaaggctctgtgaaaatggcagtgtgactgatctgttgaagggtgcattgtagtgagtccgctagggactgaagaagaggattacatagaaagcagatgcatgcttgagaaggcactctgatagccaagggacttgtcaaagggcttggctctgggcgaatggagatgaactagctgacactgcgatcagtcatccctctctacctcctactattggtccatgcctttcatcttttatgtcccagaagacctttggttgtgctttttttctttacttctcctttatacccacagcaaaaacttaaggaaactcttctgcacgtattcttcacctgccatcctatcagtcagaagagctaaagtttagtgatgtaatagatttatcttaaataagcccattttctctacattatagaaaactaagtgctatctatccaaaccccaactggaggagttctgcgtctctctctacttcaccaactcttgcagacctcagggcagtatctcatacaaccactcagttgtacagcttcattcttttcttctgcattttcatttcattttcattcttgtcttgatcacctcccccaaatatcacattacttttcgataatttttataagattaagtccattataaattaatttgtagcctattgcttaaactgcagagtgaataaaatggaatatgtgccttttagaaactttaaatgtttgaggaaagcaaaaagagcatcaccatctactgagataatgtgagaagtttaatttcacctttcagacacacacaaggcattagagagatgagctacttgccattacattagtaaagactctctttggatttgccatggccagtgcttttggataatccacggtggataacaaaatcctctttgaagcctcgatacagttatttctatttagttagtaatgagtggagcttggggtatcattaggaaaagttacagcagcagtgaatggctgtgcagagaaagatcaggacattccctcaacttggagtctttaaaagtcgagctcccagaactagttattttgaattgaaacttcagggaatagaaaggactataattatttgctgggaattgatgttaaatttgtttgttcactgattttcctgctactttctctagtatgcaaatgagacttttacttagacagaaccttcattggcactgtgagacagatgacagctgttgcagcctgaggggaaaggaactcgaggcttgccttgcccttttccttttgctttagcagcacaagtctaaagcctcactgaattttcccagcatgccctgtgcctcagttttcaaattctgattgataagtcatcgtatcagggctcactgctttgtggctcccctattaccaattgaacgttatgaactgggtccagaaaattagcttgctcagcaccattgggactagggctgtttagcagtagatgtctaattctctgtgattccagttagtgagactggcctcagagtgtggagcaatagaatgtcttcaaagaacactataagcatcccttctaggggtgtaatactgctgtgatctataaggagaggtacacacacatacgcgcacacacacacacacacacacacacacaccctctccttcacaaacttacttccaagtgagttacaggcttcaaagggaatgcaagagtctagaaaggggctcagttttgtaggaaatgagaaagatataatctatttttaaatcccctgtgcctctcactccccccccccttccattctatagtatcataccttaggtctttcacacagtccatccacagaaggaagtctagccagctgctcacgctggcttctggcaggcatgattgattgaagatgcagcatgttctccttctcctgttcccaaattgcatcctgagcctgcagtcctcttagcagggacattttaacattccacctactcattcaccccatgctcggcagctgcttgtgctctccatcggatcagaacctgtcgccctctcacactgatagggggtgacctgagaattgaaagtgacccatggcacagaaagggccatgtgtttggtgcagatttgtgacaagaatgtttgaacattaaggaaacaagtaatgctgaggggccatatccagtcaatcaggtgggtgtctggagagaaactgtaagacaacgggtatattttcactttctttcaaatcctgaagtagagggatagcatgagtgatgtttttctaaagtcaaagcatattagacatatttattaaatgttatttaacaaatgtctttccttgaaaatttgcctcgaggtggatttgtgtaatatgggactaattaaaatgtcatgagcatgagattaataagtggaaattctcattagcctccaatcatggcttcattgcaaaataagacaaactttagaagagtgaactcaatcccataaaagaagaagggaaatgatgagctgtccacaagactcatcttctgcctgaaagggcataggtgtatgtttacctgaatattactatcatatttttaaaattcatcacagtggattttagttaacttatatactcatatgatgatggatcaatctattagcatatgcacatgcatgaatatgaagcctaaatgtgcaacattgtggaagtctaggcagccttacccagtctcggcttcactgctgttagcaaatcgcttctaccttgaggacaacttaggggagtagctgtattctgctctctattttactgtaagctcttagagagaagatatgttatttatttgggtctcaatattaagcttctttgttttcatagcttcctggtgttatcctcagctacaccaatgaatatgtaagatatatcattttatgtgtgcgcactgagctgtgcagtatgttgccattggaatctaaataaaaagaggaaacaagacacagaaagatgggtttattgccaatgaagaagggagcacatgaagcactcgtgttctgtgtggccatctagagtgggtagatgaagagcaagtgcatggattgtatatctttgggttgacctttttaatgtaggtattcgctataacatagttcacagaagagactttagagtgacacatttttaaatttcaatgttattaatctttagtgttttaatgaaaggaataataaaagatttcagctgaatccagggagtgttgaagcatacttgtattactaacagttaggagacttgaggtaacagaatcacaaatgcaaaactagcttggaaacagagaaatctcttcttgctgtacataataattaacaaaagcactctcaatgcaaaaaacatgccaagaataagagatttaaaaaatgcttggtattaagtggaatatcagtatcagactgctttacttggggcttatgtgtctatatcaaatggggtgcagaaaaaaatgtaggagccagaactgatggttgaatcaaggaaccagtatttttcagacactatgggaataacacacatatgaacagtgagacactcttacagaatgcagagtatctgcacaaggtcacgccaaataaaaaacacagcctggaattaattcctaccctagccaaaaaaaaaaaaaaaaaaagtataaatccgttatctttgatgatgaagtgacattggtataccaaccaaaatcccaagacagaccccatagtaaatatttagcataaacaagttggacttcttttctttgttgtttctgtttttcttgaggagggtggagaacatgatgtcaatactggatgggaggtgaggatagtccaaggacggggtgtgggaaaaggaaagaatacaatcaaagtgtattatgaaattctcaaagaataaacttaaaaacattattgaggaaaagcaaaagaaaacaaaactagccttaggtacagagcaagtttaagatgtactttggaaacacatcaagattgtatctcaaacgaaaaaaacagcagcagcagcaacaacaacaacgacaaaaatctaaccataccctaatattcaaactaatgtagtggtgaatatttaaatgtataatattaggattttaagatgactattgattgtttttaagttcataataagcagtgtcatgtgtgtcctggtaaggagagtttcactttctgtctggtcttctgctccctaataaagcattcatctttggatctcttgtcagtatttgaccaactccggtcatttctctagcctatactgtgagatttttcttcccatatagtgaatatcccttgcttcagggtatatgcagaggctttttgattgtttatgggtcaactgagttcagttagaaatgtgttatccttatcatcttacaggagaaattccctggggggggggtgggcgtgtagagagtaagtgtgtgagactcaaagctgaggttaccacagagaaagtaaggactagacttccaggatttcttacttaagtcagcaggttttaatttgaagcttgttttcctttcatttgcattaattagtaaatgtatatgtttttgaaaaacccattttgtgaagagaagaagacatccatccgctgtttagttttgtccggtcatgttcaggaatggagatgtttaaatgaataaaataggtactgaagatagaagtagactaagtatttaatactttcaaaggattcatgtgggtgtgtgtgtatatatatatatatatatatatatatatatatttgtattatgtgatgaataggcgtgctctgtgtgcacatagttggaggacagagggtggcattaggtgacatcctctgttaatatgtaacttccttggtgaaagggtctttaaatgaatcggaagctcatcattcatggtttcctggccatgggatgctcagaatttgccagtgttcaccctcaatactagaatcacagacatgagaaaccatgcccagcttttatatgggtcctggggattcaaactcagaacctcaggttttcctcataagtactcttacccagtagaccatctggcagcttcaccaatgatttttatactaatactttacattctgaaggaggcattttaaatataaatatcatatataatggttttaattccagttcttctgtaaaagcaagtatttggagctttgtaacatattcaacctggaataggcctgatacaaattctccagcaggttgagactttgttctgtccattcttattaagatcaaaagtgatcttaatgagacaatgattgaaacgaagaaagccccatccagttgttcatgcaggtggcataaagtgctagaggtcaaagcacctgcgccttttctgtgcagcagaactgctgggcaggagatgggaggtgaaacaggtccttattaagggccacttcagctttagcacactattaatgaaatgttgattgtcaaacagaaaatgtgtgatgtgttggcagaagggaggtgcattagcgtgaggctgccccgaaccactctgaatgttaataagtgtcagaggacttgaagcaaatcaaaacacaagcactgctaaaatgaatttataagaaaaagaatgattattttgctcgaaaagtcgcagggtggcctgtaaaaatctactgcagtgaggctttgagaattcatgagagtaaacactaagagtgttgtgcgaatccttgctgtaagaagaatcctgatgatccaataaattcccttgtcatcttccaattataatgtaaattgttcatctttatttttcagttttcattttaaaacaaaatgaatgaggtgcaaaacctaagacaactgggaagaaattattttgtgtctttgatcctcaactttaaactttcaaaagtatgactgattcacaataattcctgctaaactatattttgtcaagggattacatacagaattatccacatatttactttggtatttgaaaagtgaccaagtgttttttgttttcaggaaattttattttctttatttatgtctaatatcatgttctacccaagaataatttctaagtgttatagaggaaacccttggaatttttaattattttaaatattcaatgtactttatttgaatatggaaaaaactagatggggtgagtttctttgaaagtaaggctgttaaaatgtctaaggcattcaagaaggttgagagggaggtctacttatctgccagatatttatcaaagaacttttaaattttttttaagattgtattttaattaaaacacttgtcccttccctcttatccctttaaactttcccacacatccctccccattctctttaaaattcatggccccatttttcatcagtcttttttgcatgcacatatgaatttgtatatacatatgtattccaaaatataaactgtttaattcatataatactacttgcatgtatgttttcaggacaaaccatctgacagtggacaaccagttggtgtgcttttcctgaggaaggccacctctaccacacacagctttacttagttgcctgtagttcttgtggaaggttgaggactcatatttcaccatctcatttacatttcaaatgctatcccctctcctagtttcccttcggaaaaccaaaaagccccttgtccccaccccctccccctcctccccaaccaacccactctgcttcctgtccctggcattcccctacacagggtcatagaaccttcacaggtccaagggcctctcctcccattgatgatcgactaggccatcctctgatacatatgcagctagagccatgagtcccacaatgtgttttgtttgattggtggtttagtcccatgaagctctgggggtactgattagttcatattgttgtttctcctatggggctgcaaacccattcagctccttgggtactttcttggaattttaatgttaattctctgcttccttttagctatcattgatgttattaaaaaagttctgtcttgatatttatctcttctaacaccctatcagatactagaaaccagtatttgcctcttctcaattctgtagagtaaaactcctaaggatgacagaacatctaggtttctggtgaatgcctccttcatggctgtggatagccatctttttttttctttctttctttctttctttccagactactcacaagacagagaatgtactctccaatgtttccttcttttcctgtaaatacatcaatccaattgcacttggactaaactcatataactttgatattctttcacagaacttaagtacagtcacacaattgggtaaagattcaatgtatagataatgtagaaagtacaagttagtccataataactgtttaaaaatacttccaattaaatttcacttccatagatattttaactcagcagttgaacataatttatcattttttccaatctgaatcccattgaaaaaaaaaaaaacatagtccccaaatggattattttcttctctgaaggaagtctattttgggattcaacttttaaatattagtccactcctgaaaggagagaaataacagttaccatctgtttccactcatccagaaatagatacatacagagtttagtattgaatcgatatgagaaatttgcagttctttattgagaaacgtgaaaagaatgagagcattttatagtgtccttgagtgttcttttaaagtccagtaaactgtcattcattaattcattatgataattttactctcacatattttagtgtgtagtgggtgtgtgtgtatttgtagaaatatgtatacatgcatacagaagtcaactgataacgtgtgtgaattgtttctttttttataccatgtgggacctatggagcaaactcaggttattaggataggcagccaacacccacatcaccaatcctctttctaatcagtttttactaaatgactgctatgggttaatcaccattttcagcctttttaaggcaagaaagaatggacattctcacttcaaggagtgaaaaatatcctagtcagagtactaaaatacataggcacacttttaacaaagtgttaacccctaaccccttatctagtatgtccttcagttatatttttatgccatttcttatagatggcacacatttctgagctgagtattttttccctagagaaaaaaaaaactgaataagaaaataaaatggaatttcttctagttgttcatctgcaagactagagattgaaatataggtgaatccagcccttataactatgagcattacaggagaagctctcccatgtaacttaccacagtcctacatgttgttcagaaatgaggatccaacccaagacctcacgtaattagatcagtgctctgtcactgtgatatgtccctgactgtacttcctgactcccaaagtttctggtttattttacctatggtgagctctgcacagaaacacttaaaaatagcaatgagtaactccaatgcatagctgagccagatagcgtgtgacaaacttcctactggtatcccttaccatatcctgataggtttttaagttttatatccaaatctgaaatcagttgcataagctctaagctattcatgtccctggacatgcatatctgcatcaaagcacttgtaatatagctccttagcatacctctgcttggctatcaatttagataatcacatttgtctgcttattcatataaaatctggggaattaaagaacacttgcataaatacaaaggagttgaaaattagtttccgtccagagagtatcataataacaagctgggcagtggggataggcttctgtattattcgaggtcactttgaatgggataggttgatgctttgtgaaacagtattaggtgggaagtcctagaaagcatgattgcagaaatagccggtgggaacagaagtggagaaggaagacaagattaaaacaacaacaacaacaacaacaaaaaaaacaatacaaaaataaataaataaaaacaagagcaggtataaagtttccaagtcattcgttagattcaaacaaggacaaaaatttctctgggagaagttacggactaaaaagctgtcactcctttcagttttcggaaatgggtggttaggtgaaatgattctttcagaaaggaatgatgggactgatactcctgctgctgtttctgaagcattcagagcttgcaaggctactccctgggagtgttacagtatagtcaagtttaagaaaagaagtttggctacagaaaatgcgcaaactgacaaatgcatgaaaagagagaggagtaaaatcattcctagcaaatatatagttttatgagagagatgtcttataaatccaccacttaatggagctagaggaatgagagcagccagctaacagagaagtaagtaatccttggaaaaggtggttgtctagaaactaagcatattgataatttcaacttaaaggtgaccagctgtgtctagccctctattggggatctataataatggctgtacaatattgaatagcagactttttgtaatttgctttatctgtgttaattcacttcattgacataactctaaggagtaattccaattgtaacttgctttgcaaagtgaagctaaccgactaaccaaccaaccaacagacaaatctaaaaccaaccaagcaatcaaagtcaaggtgcagataatattgtgctgaagtccacacaggcaacagaaagcaaggagtgaggataatgggatgaatctgaaaaaagtagattcctaattcagattcaggaaggtaaataagaactgaaggctgtgccccattgaagaaatggagtggcctcaatgagcagagatcacagtaaatgctcagtatttctaactctgggatgtagacaacagtagagtaaagaagtgtgcacttgaaatgcctctgtgtgaaaggtacattgtgtggtagcaacttgagggacccttaatatacaagtgtgactagagtttacaatggaagatttgtgccgccttaggcaaaagaaaagatgatagacagaagacacctcatgagtgtaattgctataaaggtgtgttgctgggagcagggtgtcagaagagaaaaggtgttgtctgtatttccctgtgagagagaaggaaataaaatgaaattgagaatattgaagggttagaaagagagagctcggtgcactttcagttcccttcccccaccccccgaagtcgtgtcccagaatctgttcaggttcgtgccttgtcagtttggctgcttcccaaacttcttttgccagggttgctatggttaacacttcacgcatggccattgttttcatacatcatattcttaatgttctacatattaattcatacatatgaattcagttaagtttttctcttagaaatgaggaaggccagtcccccaaaaagtcaaggaatggccagggtcaaggtttggatcgtttgtatcgtgagttcccagacaaagactggtgtgtatttacagtgtattgttatatctcaatgccctaattagaaaggtaccaatcgggtaacagattcaggtaaatagacagtgattgccatgtctacgaagaagacaaacatagaattaataacactcagaaacaccaagggaaaggtggaagaataacatctttaaattctcaagacagacagacagacagaccttttacctgtatgttaacctggtcacaagaggcaacttcagtcacttcccacaagtggcccagtcactgtcacctcaacttgagaaggaaagtttctacaagttctataggaagcactctccatttgagacagggacgtgttcctctgtacacacactttatttaattcagttaatctgccctcaccaccttcagctgctgcctgtggggcatgcttgaaaccgagtggtgcttggtgctgttgtaggtcccaaagatgtacacatgttattgagaatttcactgaaggattagccctgcatcacatagctgttgcctcagtaaagttatcaggaggtttgaagattaacgatcagcgtaatgcattgactatttcggctttgttttgttttacactagattcacctgcttgcctttgtaaaatgtgctttatttaattgcaactcaaaacattcataatttttaccatgaaaacaatcatagaatcctattttactctagaattctctaagctctcttttggttggttggtttttgaagtttcaagatatattcttgtttcttcatttcacgtaatcctaataacagtattgatcaaaagtaaagaaagagaaaaaaaatcagcattcaactaactttgcaattatactttttaaaggattctaataacataatgtaattaaactttttatttgctaaatcaaaattataaaaatcagtatgaagtaaaagaaggagtcttaaacatgaaaaaaaactttttggttggtgatatagcttagttgggagggtgttgctacacagaaggatctgaggtcaattcgggacacccatgtacaagtctggggacagtggtacatgttgaggacaatcctagtgttgaggtggagacatgagggttctattcttactcaatttgttagctccaggctcagtgagaaaccctgtaccaacatgtaagtttcagagaaataaaagataacctgttttaatctctggccaccacatgtacagatgcacacatggtaaagcacctacaaatctgtacttgaatacatgacacataaaattataaagtctagtgtttttgattaacaaatccacaagcttttcaataaacaaatcgaccagtagttaaccctttctttctttctttttttttttttttttttggagatttactctcaagtgtgtggaacctctgcccgcatatatatcagggtacaaaatgtgtcaaggctttggaagacagaagagggtagtgaatgtatagaactggcattactaatggttgtaattcaccacatgggtgttgggaaccaaataagtgtctctggagaagcagcaggtgatttttcccactgagcagtctctctagcagtctattagatgtgtcttagataaacataaaatctggttctctgttgaagaagattacctaacataataaaacagacaagtcagaaaactatgggtaggtctagcagagagcatcagttgaggaaaactagtctcttttgagttctgcatcactgagtaataaatcacccagtttttgagagtacaaatgaatcactgctatttctatttaaatggacgaataatgtcttgaaatatgcatatttttatgaatcagtacttttaaattgtggttatatacagaactttaaagaatagatattcttcatacctcattagcatgttatttttcagtttgagaaatactggctaagaaagtaaaacctcatcccatgaaaatattctttaattgaaaccaatcaccaaaaaatctaaaatttgccttaatatgataaacctcgtgagagattgcatttgcaatgaaaactaagaaacaaggaaagaaatagctataaaaatttatggagccgaagcttcctgcctgtggactcttcctcatgaggtggtttgataaatatttgaaacattgcaaagattcttttatattgtgcatccgtcttatgatgccaacttttctgagacaaatttaatttggcctctgatttctgcttccaagtttcctccagtcttatagagaatgaacaataatgaaaaagttgacaaaaacctgaatatcttttaaacttcttccctgagggatgagctgaaattgaattaaaattaagaataaaaagaaaaaagtctcctttaaaactgacattattagaaacctatttagccattgatacgtctccacatgtaatcaataactgttttatatatatccttatgaatagttcaacatacataagagctttgaagaatattaaatctttctctgagaggcagatacagagggagagatggagagaaaagcaggagagataaatgttagataggtaggtaggtaggtaggtaggtaggtaggtaggtaggtagatagatagatagatagatagataggtaggtaggtaggtaggtagatagatagatagatagatagatagatagatagatagatagatcatctatctataccaagcccaagttggactttagtatcaaatcatgctcgtttttctgtctcatccttctaagtgtcaacattatgataggcatttataactatttacatttttaaagttttattttttctttagtatttatcatctttatggaaggattgggataatacacataaaagataatgattaagagaagaacaacaatatgaactaaccagtactcctagagctcccaggaactaaattgccaaccaaagagtacacatggtggactcatgagtccagctgcatatgtatcagagaatggatggcctagttggtcatcaatgggaggagaggcccttggtcctgtgaaggctttatgccccagtgtaggggaatgccagggccaggaagcacatgtgggtaggatggtgagtaggcgaggtggagggccttcagaagggaaaccaggaaaggggacaacatttgaaatgtaaataaagtaaatatctaataagaaagagatataaattcacaacggattaagtagatatagagatgatagaagacttgcagaaacagaattttaatcaaggttttggaagaaaattagaattggataaaacaaaattgaagtatgaagctatcccaagtaggagacactgaagagttagagttgaaaatatttatcaagaagtcaaacactcaaacattggctaaatataattattgctcatagagagctttcaaacatgttttctaataagacatgtggctgaaggtctcagagttcatgctacatgcattattccaggctgtaaaacagaaaacagggattctggatcattgtttagtagtagtgagagaaaaacttagaaaggattgactctgataattcaatccagaatagtgttttactctagattgaaatatccactttaggatgtaggattgttttctttcattagctgccatttaccctgcaacaaggaaaacggggtagaaaaatgaggaattgtgaatggtcaacaaattagatttccttcattttttatgggccaaatgacaattatagtaaatttaagatcatcggatattctctgccctattttctttaccttgattgcatgattatcacattcactataagaattatatttctaagcattgacactaataatatgtagacctggataatgcttaaaataattcatgcccctgtagcttgtctttggcaactttgtgggttctttttacttctatccttctctatctcttttcctccatcttttcaaccccctaacactaggtaagaaagaaaaaggatagaggggggaaggaaggaaatctgaataaaatcaagggtcaaaaaaagagcaaaattatttttagactattccctgataattagtatcaccaagctccttggacaagtttgatctttgccctcaaggtatcaaatttcttattgttgttgtttatgtttctctgtacatgactacttaaaaaaaaaaaaaaaaaacctgccaccaacaaaaatcaacaaccaaccaacaacataccaacaacccagcaacccgtcaacaacctcccaccccgccacacacacacacacacacacacacacacacacacacacacacacctctttatatacccactgaaaagtccccaaaattccaatgtgatagtcacagaaatgatgtgcagcttgccaaattacataccatgccaaagcatgagacaaatcataatcaactgctgtggacaatctgaagcagttccatatcccaccactggtattaaaatgaaaacatattcttatattatttctgtgttttaaagaaaccaaaataccaaaggtgtcactacatgcccctgtgtgccagtgttgcgatttgaatgagaatagactacatgatcttttagactgccttggtcccagtttctggaactctttgggaatgaataggagatgtggccttgttgtgggactatgtcacttggcatgactttcaatctttcaaaagatgattccactccaatcaggtctatagctctccttctcagatattgcttcagtgtagtgtctaccaggctgccaccatattccccaaccatgatgctcacagagtaatactctgaaactgtaaactacaaatactttcttttgcaatttgtccgtgttatggtatcttacagcaatagaaaaatagctaagacacccagacactggtaccaacctctttatcctctaacaatagtccccagatagtgtccattgggcaagatcaccttccaaaaagaaaatcactgctttggagagaaaatagactattgtgttaaatgttgtgtgtgggttaaaatgatgtccctcatctggtctgccacaggggtagggctgcttgtggaggtgcaatgtgggaagtttgactgcacacactccatgcctctgccaggtgagtgttgggctgtaagaagccacaggactccaccccagaggtggggcagtgcagtctgaggtccccacagagttggctcagggtccctaaacaaagggcagcggagcattttaagaacaaggaagttatgagaacaannnnnnnnnnnnnnnnnnnnattaacagaaagaagcacaaagtcagagataacaaagttttataagtttgatgtagttgttgtttttaaaataggggaagcaccatgatagaaaaaaattgagaagttaaagcaaccggctaaaatgacaatccaggaatcatttatgcaaacttgatttaaatttttaatttacctatcactttgttatcctgtctggcaaaatttgtagtggcattttgaagccaaaaatctctaaatgtgaccaacatttatgttttacaaaagataatggatggattgctagaaacagtccaaaaggagagagacaggtcagtgcccacggctgggtttgcatgtgtgatagtaaaagcaccaatccacttttttcttccttggaatgtttatagataaaacataactagagaagacccagcatttcattgcatatatagatttcaaagacttgggaagaaatcttatttcagcatctgtagttggttttattaaaagcagtttaaattcccctgcctagagcagtttggaattatagagatgggctgcaggaatttacattttaattgaggcagaagacaaaatagggatggtgcagcattcacacattacacgaaagaataaataagatatgtatcagctgggagaaaagaaatggctcgtcgtttctcactgtctcctacattttcatttttgcatgtggcagagtgctgagttagcctgctcagtcaagacagtcttttctagtcaaaatgtttactatttcagaacatccttgctgtgaaatatttttatacaatggaaccaatatgcgaaaactcaaataggtgtgtattactgtgcgtggtgtggatggtatttccaatctctgtgaatacatgtagaacttctcaactaactatacagaaaattattttatagtttagggaatgataattatgatcaattctaatttatctctcaaatctatagtttgaatgttatttcatagctttatagaaagagactgcttgctcttttatagtatgtaaaggtgtcactacatgacggtaggtttttcaaatcaaattttaggatttacctgggtttgagaatttctttaaataagtgtaaatatggttcatgttttactgtactttttgtgaatttggttcattcacagaaaaagatgttgaaaattaacttatcaaaaggataaaaataatacatctagaaaatataaccataattttaattatgatagtctcaaacaacttttaggaaactaaaaaaaaagggggaactatctgtctcttggcatgaaccttcaccagcctgttatatttgatcagttgcataggctttgtctatttagaggctttcgttgtcagtcatcattataaacgaatcataaaatttaaacaaataagcctataattggcaaattatcatagtatgatcttccagttattcccctacagtggcaattgctgtaattaggccagaaaaaggaagagttttaccctaaacatgtgtttctctgaagtcaagggggttgaaaatcttcagctttagccaacaaaatttaacttgctttataaattgcctgaattataatggccaaatttaatgctgacatacattaacttattgattggttggcgttttatataatatatatttacacataacattttgactcgaaatatatatgggtttggtgtgtggttgtgtgtccacaagtgtgcagtgttgcatggacatacccagtgcggccagaaggggacatcagacatcctgaagttttactatctatcttattcccttgttagggtctctcaatgaatatagagttaggcatgaggcaagcaagcctactagtgccttctgctgtactctgaggacactgatgttacagatgctcacagccataccagacattttatatggatgctgtaaccaaaccctcgatttctctcatcaaactcttgatttatgccattatttatggttttctttactttgggagagtctcttgtaccctaagctgccctcaaacttgctctaaagtagaggcctttgcctgttcctcccaaattctaggatcagaagtctgtgttaagtattgcagtaatggaggttgggctcatgactacatgagaggcagaaactataccccctgaacagttccctgaaataaagtgattttctaaaaaaaagcatgaagttctggcattaaaaaaccatcacacccagatagcactgttattgttgctattgatatcatggtaattgtgtaggtgtttttcactctgtactaaaccaccatcccaggatgtttcttgagctctcccagtccatttttatattcattatgttttgatctccatgggctaactcaacgcttgggtttcctttttgggtttttgttgtttgtttagatgctatgagaaatatttcagagagtagtttggacaaatgagctataggaagctcatttgttcatcctgtttgtctgggcttttaagtttctcatggtcttttgggtcaccttaattccttggtgcacagttgattttctctgtgtgtttgttacatgttgattccatataaacaacagatattactataattatcaatgtagaagcatgatattttcaagctcaaaattatatttttttcaaaactttgaagctttatgcttttaggatactcagcaatctcaatgaggattgtaatgatgaccatattctgattctcttgttaagaaatttttgctatgtgaaagcatttagattattacatgtacctttggaaatctggcattctttgagtcgagtagttgtgaatcccaatggacaagtagccataaaactattttaaggatttggggtgtcagataatcttttagacctagtttctttactaaataagttaacaaataccatgcactgtgcaaaacaatagattttatgatagaattttcatccaagtatgtaagatactctgatcatatcgccctcttatattctttctcttctttatctgctaacagtttcctttcagcttttacttatttctgttttcccccaaagattatacatggggagaaacatgtatatatttttctgagcatggcgtattttgcctatcatgattttatctaattacaaactttctgtctctttatttgctatgcattcttcaatttctttctagattgatagggctattttgggttaattctttgtatgtgtttaagctatttcttagagtttatattcatttatcttttcattcagtgcataaatgagacttttcatctttctcaaatttttctcctattttcttactgaagtttagacttcaagggtctttttcgttcttggtcttgttcatgatgcacttctctgtttctataggggatcaaattttacaaatcagtaacaagcaataggaagctcaattgttcatcctgtttgtctgggcttttaagtttctcatggtcttttgggtcaccttaattccttggtgcacagttgattttctgtgtgtttgttacatgttgatagcatacatatttatgaaagaaatcatttatttgctaaggtaagtctcagtaagcatgcaaaattattttttctcaaaaaaacattgcaaaattcctgtgtgacttttcaggcttctctatactgtgctagcgcaattcacagacagacatactgaagagtttctgtaatgagaatggcttcacattcaaccctctgtgtggaaatcttatgtgcctttaaaagaagttttgtaatcttggaaattagagcgaatctggctgttaagtgtcactcagccagtccttgtttggtgacagaacaggtagtttttctattgttcccatttcctgcctgctagctctctctatagaaatcttacctccagacctctgtttcaagcaacaatatgatagtacctaatttctgtcatccaggcattggtgcaaagaaagtgtctccctgtcataaggtttgtcattgtcctttatcgctgtttacactgcttaactatacaattatttagcctatttatttattatttatttttggttctgtttttatttacattttaaatactgtcccctttcctggtctcccctatgcaaaccttccatcccatccccctgccctttgcctctaaaagggtgctcctccaacccaaccactcctgcctcaaccctctagcatccccttatgatgggcaacaaggctccacaggaccaaaggtctctcctcccattgatgccagatagggccctccttgcctatttatgtatctgtagctatggatgcctccatctttggttggttgtttagtccctggaagctcagggggttgggggagggccagatagtttatattgttcttctggtaggtttgcaaaccccttcagctccttcagtccttcccataacttttccagcatctttttttttttttaaaggaggcaaaaataaagttaagtctgatactgtttctgatatcagaaacaataatactaaggtacatacaagagtgctctcagcttgctctcatcccactctgtattcatgttctgggtgataaacaagaagcataatggacttcctaccagtgagaggagctatcatcagttctcagtctgcctctgctcattcacaatgtctaccaaaagtgaaagaagagaacttcacccagtttccaagaaattcttcagctgctagacactggtacagtcaaattgttttataatcttagctcaccacattgcaagttctctttgttagtttaacaactgttgctaaactttaccgcacatatcctctgtagtagcacctagaaagatgcatcatatttgctcattgatttctctacaaccaaaacaaacaaacaaacaccacagggtaagtgtactggctggttttgtgtgtcaatttgacaagaactgaagttagcaaagaaaggagcctcccttgaggaaatgcctccaagagatccggctgtaaggcattttttttcattagtaatcaagtgtaggagggcccattgtgggtggtgtcatccctgggttgttagtcttgggttctataagaaagcaagctgagcaagccaggggaagcaaaccagtaagcagcatccctccatggtctctgcatcagctcctgcctccatgatcctgccctgtgtgagttcctgtcctgacttcctttggtgatgaacagcaatgtggaagtgtaagctgaataaactctttcctccccaacttgcttcttggtcatgatgttttgtacaggaatacaaaccctaactaagacagtattaggtactcattgtgacatcattaacctaatgtggactgtaacacaaaactgtgaatatggtcaatagaccagagcaagtcttgactgtagctttttgattccatctgaaatgaattctggcatctcacattctaaggataccagcactgaagttccagaaactactcactaacctccccacccctcaatattctcaatattctctactaaactccctaactaactactctcgctttgctaaacctggcatgaaaaatatttccaaactgtctgagtcctcgattttatatattgattaagtcaatgcacttcctctactaatgcaataatttcacctgcttatcaatattacacagcaataagctcaagaggtttagtcagcaaaggtgccaatatttacactcttttaaattagttcagaaattcagctaatttttatttctggctggttaatgaaaattgtgctttggattttctttacttactctgcacttcatttagaaaaaagatctgaaatgcattaaacattaaagtttatagtccagaaagatttagaatctaatcactatgtaataaacgtgtggtttttgttttgttctgttttttaaacaacaatcctctcacacaatttgaaagcaccaaatgtttacaaaatatcatactaaaaaaaaatgtaacagagggctcatgtaccgtttgaatatctgtgcatatgaaaagttagataactgacagatgttttcattctgtatatgaaagctctgcttctctgtagatttgaccaaaataatataaaagaaagatcttctgtcacagaaatcttacatgttttcaaaattaaacacatctcagctatgtttcaaaatctggttcctacttggttatcaaacattaagcatccagctgtaaaatttattagaattaagagtctatggtttaaaaaattatgctgcttcaaatattgtacatgataaagtagttttagtcaaatatttatgtgtctagcagcatcaaatattttaggtctgtttatgttttgcctataaaattttaaatcttctattaggaaggaaaatggtgtgaattttttatgtgtacatttccagtacagtatatatgttcttaaagtagctttagttttaaaaagttatacttatgtggaatactatccaacctgagaacaatacaacattttatgatagcttaatttgattcctaaataaaacaacaacaacaaaaaaaccttcctgtataatgattatgtttgaaacataggacattctttattatctatcagtatagtataaagtctgcgctctagaaaatgatccctgcaaaggaacacttaataaaagaatgtcccttccacttagattcacttaaaatgataacattataaatcttataaatcctatccatttatgaaatcagtataaattaatataaacttcaccatagttattttcttaaataatatttgtattaatttttgaaaatttcatgcatgtaagtgtgcctatgttaattcattatttattttttgttttattctaagttaaaattttaaacttaattttctgtaagaatttcatacaagtaccatatttacaccatttgaccccatttctgcaaatgttcccatgtctccctctacttactcatgaacttctctttgagcccatttagtattgcttatatgtgcatgtatttgggactgataacttggataacctatcagaggtgtcatcactggaaaaacaaaacaaaacaaaacaaacaaacaaaagaattgattcccctttctcagcagatactggttttcctattaaacattttcatgtggaggtgccttgtgacatatacctgacctatataggtttggtaactagtgctataaattgctttaattctaagtgctatgactttaattttagttataataacaaaatcttttttaatttaatcttattttttacttattcactttacatcctgctcactgctcccctccaggtaactccctatcacaattcttcctccatcccttcctccctccccttcttctaagataacacaatcttagattgtttactaactatggttttggaaaagtcactcagaagcagaggcagatggctttcaacatagtgagatcgatccaaccataaagaaggatgtcaagccaccttggagagaggttctgggaaaaggggtctctaagtttcgaaaagaacaacttgaaatcaaattgtggatccaagctgatgatgacctgtgttctgcttgatgtagctttttcagtgtgcttctctttatattctgctttctccatgaacatttctgtctatattctgcttgcttgatattctaagagatctctctgtctatgtactctgtctctgtctctgtctctgcctctgtctctctctctctctctctctgtgtgtgtgtgtgtgtgtgtgtgtgtgtgtgaattctccatacagttctctctttttatcctgaaaaattatctggatagctcatgtcctacaggacacaagcccagtcttttattttacacatcaatctaatcacttattccaggtttcctcttgattaacttaggaatcagtatcctatgaccccagctcttttattcttaggagacagcaagtacacattttttccttaatattgctaaagacttcagagatctgtttgccttatttaagcacagaggacaagctatttgggtgagatggacttgacctgaaaataccttttccaccatacctaagcttaaccgtgctctttcctaggctgaccctgaactcaggaatctttctgtttttataagcataaataaaaaaaaaaattagctgggcaggatcttctgtgatcaccactccctaaatctctttatctcctttcttagtatctttctgacaactttgtttctttagattcatgaagcccccacataatttatattgcatccatattttttgcatggttgagacattatatattttcaaactcatagagttagacctcataagaggtatcctaaaggtcccagtgtttaccattttgccaatatatagccacacactacactcctgaactcatgctgtttctaattatcatggagtctttaaaataacagggaaggcattcctcacaaggaaataatcatccactgctagtgggtccagaaaatatgtatattattacacaaacatgccttatgctcacagcagccaaagacactcttggaaactcacactgggggtctgtcccagagataggaaccatgtctctctgtcaccacccaagccacaccagactaggcagaaggatagctatctcaatgggagaaaatttgcctagcatgcataaagacctggtttcaataatccaagactgcaagaaaggtagaaacaagggaagggaaatagggaaagttaaaagagagttagaaggaaggcgagaagaagataaggaaggaagaaatagggagctgagagaaagggaaggtaagatagagaaggagagggagaggatggaatggcaggagaaaatgacagagacagatagagacagagagacacagataaagacttaatccccagaactataagaaaggaagggacataggaaggaatatttaaaaagaaggttgaaaagaaagatatggagacagaaaaatctatgcccacccccaccccacatatacaaagattaatctgatagtagacagtattcatttattcattattttactttttatcatctatctattctatttatctatcatttattcactttacattctgattgtagttcccttccttcctctccttccagtttcactgtcacatactccttcccctactaccttcatcattcttctcaaagaagtggaagacatccatcctccatccatgtgtacataagtgtgcacatcaagttaccaaaggactaaacgcatcctctcccactgaggccaggcaaggcatccctgcttggagaaggggatccaatggcaagcaacagaatcaaagatagccctgctccaattcttagggacccatatgacaaccaaactgcacacttgttacaaatgggtacaagtgtgtttgctgtacagaagataccatgcaagacaaacagagaatttacccattaagaataaaagagggaagtgggactggagtggtggtgacttagtggtaagaatattggcgattgttgcagaaaacctaggctcagttcccagcaacctcatgacaggttgcaaccatccatataactctagtagcagagttatatataagtcaccacttctttttctatttagaattttgacttttaacactgttatccaaagattttaaaagtttaaaatatgtgaataacacaaatctggattgtaatgtttatccaatatttattcaacaattaaagggtttacaaagctaaaccatggtacaacattatatagaggacatgaaatagacatacaaccctactttgctgttctgaaagccacattgataatggcccatacatgataggaaatacttggcttatttgcagctagagtaagaattgtttgttgtaagactcttctaattaaaagtaatctagttgaggcagttttgtgtaaatcaatgctaattttaacttacatgttttgaagtatactactcaaataaacaggctcatgtttttcctagaagtcaaaacaaaatgtggatgcagaatgagttgcaaacgaatttctgggaagctgtgaattcagtgtctcacaaacaactcttttctacccaaactgatgattttttaaaaaaaaaatcagtttacttaaaacgcattctcttaaacccctgtgatctttatgatattctttcagggatttttgtttccacattttcacccagataattttgatatcaaatccctgttcaaacatcacttcctcaaagctatgctataacgctgccataacctcatcttcatcagtcaggcctctgcgccaggaactgaaagttgtctgttatattcttaagtttatggacctgtcagttacatcacaccttcattgtccaatgtggtatccccacatacaaagatctaaatgtaagtcgaacactaccgaaagccaagttgacgagttagccttctttatttcacatgttcgcaacaagtatggatggacagcacttactattttttatctgcacagatatggaatgtttccaacagttctcagtctcctgttggtcaaatcaattgtcaatgctgcactgagatctcttgctgattcccaagaacctcctcttctggggtagttcatgatatacagaggggaggaagagatgagaaagcaaaagtgaaggaagccagtaagaccatgctcatgctctatgctacccaaaccaaagatgatttgtgtttcttgagccgtaggctacaatttctcaagtagcgtgaggagatttgtatttagaatataaaccaattgatctgtttaaaaatgaaataggcctttgcattagaaattgagtttggtctctaaattatttcaaggttggtacttacctgtcaggacagggtaattgttgtaacaagaagaggataattgagagtcagtcattctccttgataacacaggagaagtttcatgaaacttttgggaaagtttgactacctgtcacctgccataccagactgtcagcatggatctaaactttgcttgagaatatgaaaaatatatgtgttgtttttctctgagatagcatttactgaaaccaacctagctcaaatgttctattatatttaagaactgaagatagaaacctgcgtttgagattccataactgccagagaccaaacagtcaccccaaatacaaattataactatggaaaaaggtcatatcagatttaaatatcattgattagagacagataaaaaataaatgatcctaagttttgtgacatttgtcatttcatcaactgcctcaaccgtatgaaaattttatgcataaagaatattcagtaaccaacaaatgttacaagacctgattttttgaagccattcttctaactgcttagtgaaagccccacagacttattaatcatttctaaaacaataatagtttcagttttctttttgtgtttttactcactgttttcaaaacctgcatagttctagccaaggaatcacagcacagactacagaacatttgaaaaggagctaagaaccacgggtgtttttaagtttcaagctgtttgcagcactggagaagggaatatagtgcgcttccttttgtattaagttgaacaaactttgggatttcacattgtctctgttgggggatttctttactttctattgtttagaaagtcgtttgtgatgtaggagcctgcatagagtaaaaaccttgagaggaaaaccagcgaaagatattctgtgagggagaaagaaaatgtggaactaattatagtaatgtacacatgtaatccaacacgcatgagatggaagttggagaattcagactttcagaccagtcttgggtactcagagagttttagggtactcagagatgtacagtatcttcctgtcaaaaatatcacaagcccaccgagaaagaaacaattaagactaggatttaccccaggcctcaaatctagttgaggaagttctttagcttcaatgaatgatgcagggctggcttcctcatcagagtttgttatgttacatcctatgaaagtacagtgctactgtattatactcttattctacattctttgtataataaaaacctgcatatactaccctaatcttaatctaaaagtaatttattaaatgatcaattgatatttttaagtgcttgattatgtcatccaaaaagatgttgaaaatttaaactggtagtgccccatatataatatgataatataattaatgtaaaaaaaaaagtccttgatgatttagataaccaaggtcacgattgagctatgtggacctatcagaacacagagagataacacttttaggtgttatttgcctctgctgatacctttatgtgagaattcatagctcttagactgagaagaaatctatctcttttgttttaagatacagagcttgcagtggttagagatgaaagcaccaggaagcaatcataattcccaacattacttgatgagttcatttccatatgttgaagtataatagtagaagatgcatacatttaaatcatagtttaatgactgaccccgctgttcctttatgacttgtttggtaattccaaaatggttatagaaataaacaagaatttcttgaaattatgagcaaaagttgatgttttcatatgtaaaattttctgaggccaaagattgatagattttattagtcttaccaagggagtctaagacactcactttcttttgatgtcaagattttagaaatactcactgtgattagaatgatatagctggagttatctaacacctacaatacaagaggattgggttatgaattggcttcagtcataactgtcatcagtctagctatgatcttcgcatgatattcagttgttcaaaagtgatctgtattgtgtcagccagaatctaaggccattattaatattaatttatagcaacttatatataaatgtatgccaataaacacaaggtaagatccagtaacaaaaaaatgcctcctttttgtttttactacatcctgttattgtctgtgttcttgaaatcatctgtatctattgtatttataatacacacaacacacacacacacacacatattacatacattatatatttgttaccataccatgaatttctttccataaatatcttcaggagtataaaatgatagcttaatatcagtcatagtgaaaaagcagattccaagagaaactgttgaatattactgaatattactcttgaaagttttcagcaataccagctcaaaagctctttgccaggttaccaaggtgtcagatgtgactaatcctcttctgctatatctgaggtgttatccatgggttggggtattgtatatggatatttgactgggataaaatgagtgctctgggacgagagcaaataagatgttctcttatgaaaaattcacagatcatttgacactactgctgtagctctagatatgagctttccagaaaaggaactttcaattgacaaattccaaaaatctcaaagaagaagatatgaccctgttccttttgactaatatgaacaattgccctaaatcaaatgaggagaaaattgtttgactttttcataaacatgtactttaattgtttagcctagaattaaattatattttgcatttgaactattatagtgattcttgggtgtaatttccagaaactattaattctacctttaattcactgattaatttttctagctgtgacaaaaattacataaaatgtttggttctgtttttgatattttcttccttcatttctagaagcaggaacataatatattatatctcaaacaatgaactgtatcaatggaagtttcgggcaaacacctttgttcatgctgatttttcttcagtttctttttttcccctgttgaattttcaacataagtgtgaccttatgagaaactaatctggcacccatggaggtgattctgaaagtatcttgcaatttattaactttctttatctatcaactacattcggtaaactaagaaaatcttgaacacaagaaatatcatactgcctgccagtgtgttcttcctttaaaatagccatttctaaaatcatttactttatttttgtaactctggtatccaaatagaaaagtaagtgattatacttttctgatactcttttattgttaatatttacaattcagaaatgaggaattaaatcatgaaacagctgaaaattgttcctctagcaatgtacaaatatccttaagacacataaaattcaactccattcccaggcataaggcttcttgattatgtttttggagaaggtcttttcaaagccacaggaaaaaggaacactggcacaatgatgtctgagtttctctactgaaataagtaattctctttgctaagatggcagtgatcctgtaacaaggtcagacctcagagaagactgatgataaaccaaagtaaagatacctgtcgtaaaactaatttaaagcttcaccctgactagcttacaaaaaaatgagactcagactatagttatttaatgtggttttgacaattagtgggagagggaacccctactctactcttgtaactgctggcctggttaccttccagcagagtatgccagatacttgctgtttctcctggccatgtgctcatctcccattatggaggcttccacctctcttttcattcttctttctccccctggtctctcctccaccaaccaggtcactcataggcctagacctttgggtatagtgtttagcatgacaagatatagcaacagaccaaatctccacagataccaccaaacccaactttttgaaccaataattttattgtggttccttacagaagtgtgggtaaatggtcacttacagcactatacagaattcaaagacagatgtatcaccaaaagcatacctcagcatgggtgatgactcaaaacaaaacaaaactaaacaaaacaacaacaataaaaagataagaaaccaaatcaaccaactaaacaaacaaaaacaaaacaaaccaaaacaaaaaacaatagataataccaccatcactatcatcaccaccaccaccaccaccactatcaccactaccactaccaccaccaccaccaacaacaacaacaacagcaacaacaaacccctcaggaattcgggatatttctacatggcttccagacacctcaacacctccttcatctcctcagtcctcactacttatacaactttgtagagagtgggacctcatgtatctgattaagtttgtagaacttgctgaggatttcaatttcccgattgtcaaggagcttgcttccttctagtttagatcttcctgagtcttaatggccttctctccagcatggaatgtttaaactggaagattcaacacaacacatgaaacattaaactttggactaaaaaagcttttgttacaaaatcagttttctttgaaaaaatcatgaatatcataattatgaattgagaatgtcattcagcctgcctccttttgttattaagttagcaagactgttctaccctgctggttataggtaaaatgaccatgaatacccaggatgtatgaatgtttcaaaatggatactgaatattatttggctttgggtgatgttgtaaagcagccagttcctgataagactttatgcactgtccttataattacacactttcttttactttgagaaatttgaaaataaacaataaagatattttaaaagcatttgtttttaaagtggattagccttgaaagggaaaatagaagaggtttggaccacagagttttgcaccagataaatttccaggcaacagtgaaaggcttgatactgatatctatgctggcacctggtctttagaaatgccagaaatgggcatggtcaagtttctttgagtttctttctttttaagttaccaacaccaagggcagctgcttgtcaaggcttctcaacataaaaaggaaactctgcttttcagaaatgttttgtgtttttttaaggtattttttattaaatattttcttcatttacatttcaaatagtatcccccaaagccatctataccctccccgccctgcttcccaacccacccactcctgcttcctggccctggcattcccctgtcctggggcatatgttctttgcaagaccaaagacctctcctcccattgatggctaactaggcgatcctctgctacatatgcaactagagacacagctctgagggggggtactggatagtttatattgttgttcctcctatagggctgcagacccctttagctccttgggtactttctagcttcttcattaggggccctgtgttccatcctatagatgactgtgaacatccacttctgtacttgccaggcattggcatagcctcacaagaagtggtaatgtggaactctatacctcttcttatcctctgggggtatacactttaaatccatgagaacaatctaaagaaattaaaccttagtgcaaaactggaagtattagcaaatcgaaataactttggaaatgaattttataataaaacatttctaggtaaaaatttaaacttaaaataaagagtcagaatcaacttccagtccagagctgccacattcaagaatcttagacggatgcccagaacatttggaagtagactgtagcttgctaagatgaactctaccacaatatactgttagtcagcacactgatcatacagagacaagcaaaggcagacaccattccatcttgtaaacacagcagattatattaatttcattagttccatgagcttgtcagttctggcgagaagtagaatcatcagacagtgacagtcttgaatcccatctgtagtattctactactaaaccactttcacgaggacataaggaggtcatcctttgctccttatatcccactccctgcaaaagaaagcagccatggacatttaagagattgcttacaatatatgttggacccatagaggaactgtgtcaaagactggatttattagtcatcaagagttgatttaaggtagatgatagcttggtctgtaggaaagtcaaggagatttaaaaataaatgaatataaaggcttaaagagaatgaaagaactaattaaattacaagcactctaagcttcagacacagaacaaaatgagttgcatctggcatagggaacttaaataccaattcttcattggaaaagcattgtggttgaattataatggtcatggtaattcaaggagatgtagttacttatagagaaacccaagttgacaatgataaattttataacaaattcattgtaactttggaggtgtcagccaattaaataagtaatcaaagcacaaatagaattaattccctttgaattgccagctccatagagagcaccatagcttggcaaatactgagaaattgcagagaagtccttcaaaatatattgtctggaactgagtaagagctgaggtggcaaccgtgtttacaaggaagaacaacctaatttggaataaaattcaggcattgagttttaagtacaatatttttagagtcagagtcaaactgtggccttgagaatggaaactacatttcctagttttctgactgtgtacacataaatacaaatgtatgtagtaacacaaacatacacatgcacacaagcacacacagaaacatgcatgaacatactcatgcacaaagtataccatcttttctctcaaaggcaaaacttagcatgattatcagcatgaagtacctagtgatatcaaataacaaatgctgtgaactatgttcaagtggatggcttgccactaaaaatctttcccaatcactctctgacttaaacacagtctttagccaagtcaaatgacagtgactcaaacaggcacattctcagttatggaatgattacgtgggccaagcttacctaaaactatatcctgtaaaataaaagaggtttaataatttccatattgaacattttcaataatattataatttatgcagcgctattgaagaatgcttatagattgaatctgtagatttttttgcagttctcagaatacaaagttagttataataatgaaatattaaaatttcagcaaggggttttgaattcgatggccaaaagttctctactaatagtatttctcaagagacttagaccacatttttatagatagtcaacacttcactgtgctaagatattttgatgagtagggaccgtgtctactatctatcattagtatctactttctttagttacacttctgttgatatctcactaaattcttctcaattttgtcccaaagaagttgttggaaactaaaatgttcacactttcattgctccaggatatgctactgtctagtgacatttgttttttctcgaaaatgattatccttcatggataatggaggaaagaataagaacccctcctgcctaacaagtgcttgcagtgtaaagctttttagttgcaagcgagttcttggaattcctacatcaacgttcacttaattaataatcagcttgttgtgtaagtatcaaatatattaatctgcgactctttttcaaaattaaacagtttgatagcattgtccacttttgcacaatctacagttacatcccaatgagtgcttaaaaatgaataggtggataaatgtattattctggtaacagttgataatagcaagccttaaaaatataataaacatcttaagttattttagcattaaacatcacaattttatactcatacactatggaatgaattatactggtgttgctttaaagagcagcttagaaagagtttaagcatgcatcaacaataccacatgtcaggtttctgagtcttctgtatgtgaaactcacatcctgtattctagccacagaaatttgattaagtatggaagaacacttcattcaaccaaccctggaagacctctgaacatgtaagatgggataatagatctagaatacagtaaccaaactcatccactcccatccaaccctgtagtctcctcaccttataacatcattttatgatatttgtgggtgctgggaagaattagttgtgttggaaactaggcatatattgaaatgtgatttttacttatttagaacattgtgtcaataatatggaggagacccaaagatattctggaaatttacatttcttttattctctgatgttctaaacctattttttgaaataaaaaaggatataatgtaatgaaaagggaggattcttctctaagctctagaatccttagtaaagatatcagcccatacctgatattacttctatacgctcagagttgactacaggtgtgatagagtaaataaatgatatacatggactacccattttgtcaatcatgacattgttaaaatggaaatagtcatcttaggcaagggtaaaagaaaaaaaaaaggaaagaaacacgtctaagataaggaatttaattttgaattcaggtttcaaaacaagacgacatttttattttacagatgtttgaactttgtatctatgaatattcttccaactgtctagatcagagatagatctgcatgttgatcacagatacccagagaaaaatattatgaaaatagcaagatgaataattaaaaagtatggcatttaatggtttggatagaagtttctgtttggatattgggaacttttaaaaatcaccactggggaaaaaagttctgaaacccaaatcctattttagattcccaatagataataatatttaaatagatattaataatatctattcctaatagataataataattcctaatagattcctatatgcatgtcagcccaaattgtgctgtgttgactagacaacaccattgttactgatcccatcctgtcctggactttgtcggggagccccagagtgactgctctaggtagatgcaataaagcagcaggaggtaggctggaaacgcatggacagatgtgattaaaatcgaatctatcaaatattactgctttaaattcattcaaaatcgattagacccactcctgtgatcttgcctcacactggttttgttgagctaagttaatgttgcaattaatcttcacaaaaatctaatttatccccaagattctgtcatgccatgatctgtttgtataaatttgagacaaaataccttgtctaatttgatctgtagtcgtgactgcaaagagtgagctgatatcgctttgtttctaaagtgatataattaggatgctcatgctttttctaattaatctaatctcaacttgctttggctattagatattctagaagaatataatgaattgttgttttcatctagttcattagtcaagggaattaattttgccaagtttaagacatacccaatatttatatttgcatatccagatttcaatccaaagcagattttcttcaaatattatcatcacttattaaataggattaattccattagccattttaataatgtttaaataatagtatataataatgaataatgtattatatataattatttatgcttatttattgataatatgtattaagggtattcaatagtccctgttttctaattaatatatttactgttgggctaattgtatttagtacaacttattgaataattgattgaaatattatataaacttatatatatttagaacctaaataataataaatttatgatgtggctattatattctagataaatcagtttcactctgacatttttcacattggaatataaaactgaaaactaaatgcacattgcacaaagggagtgagaacattgtaagaaccagaagttcaggaagtttgtttgaaattttgtctcctagtaccaacagaaactacacttaaaagtcacagcaacacgaccacgcaaacctgagatgaaacaggaggacatcaaacagcacgttaatgtgggcattggaaagttcatgaagtctcagtgctatacaaaaactccagtcaactgagcaacacctcagatcttccccagggaagagcacacaaaccaactgattgtcccaccccatatattcagtcctgaaagtatatacacaaaaaacattacatagactctacaggttatatttaagaatatatatgcatataaatatacacatatacatgcaataccaatcagtgaaaaagaaggccattaatttgaagaagagttgttagagtttgtgagtggttctcaaccttcttaattctgtaaccctttaatacagttccttatgttgcggtaacccccaactataaaattattttcattgctacttcatgactgtcattttaattctgttatgactaataatataaacatctgtgtttccccaaaggtcttaggtgaccctgtgaaaggggcatttattcctaaaggagtgataactcacatattgagaactccttttttggagggtgaaaatcaaggaaaacatatgataactaactaataatctcaaaaataagtgagcaggcactaaatgagaatattaaaatagaaaggtttgatggccagggttttaaaactatatcattggttatcccagcttttggttagtttttgtaactaaagaagaataattttaaactgaattttattgtttttattttctttaacttttttattagatattttctttatttacatttcaaatgttattccctttcctaatttcccctctgctcaccaacccatccattcctgcttcctggccgtggtattctcctatattggggcatatgatcttcacagggccaagggcctctcctcccattgatgacctactacgacatcctctgctacatatgcagctagagccataagtcccaccatgtattttctttggttgacggtttagtcactgggagctctgtgggtactggttagttcatattgttattcctcccatggggctgcaaacccctttagctccttgggtgttttctctagctcctccattggggacactgtgctctgtccaatggttggctgtgagtatccacttctgtatttgtcaggcactggaagagtctctgacgagacagctattagtacatactgtacaaaacaaggaattagacatgcaactcagatgctgatcctttgctgctcttgtaaaggaccagaattctgtgtccagcacatccatcgggtggcgcaaagccaactgtacgtcagggtccaggggactaaatgttttctcctgtcccatatatgctctcacactcatgtgatagccacatgctgtaaaatgaaataaatattaaaaataataaaagtaagaagaaaagtagattaatattagtttttaagtgaaatgttattattataatatgttattatattatattaatatttaatatttccagcccatgggttctaaaataaaattattgactcatagtattaaatattaaatatacattatgtaataaaatgctaatgaagctannnnnnnnnnnnnnnnnnnnattatgtaataaaatgctaatgaagctactctttaaaaatatcataaagtaaattaacaaatacttagaataaatcatttatcagagtcaaaaatggttttgatttatatcacttattgattttaaaatttttgatttttagacaggcataggggctcatgcatttaatcccactactaagatttaatcccagcactactgggacagagacaggaggacctctgtgagttagaggccatcctggttttggtatagacagtgagttccagaatagacaaaagtaatgtcccacaaaataattatttttccaaatgagcagttaaaattgttaaattttatgtaaagagttaaaattatttcttttttttaactttttaagatttattttttattagatgttttcttcatttccatttcaaatgctatcccctttcctagtttcctctctgaaaatcccctataccctcccttatccctgtgctccccaacccgtccactccctcttcctggccctggcatttccctatactggggcctagaatcttcacaagaccaagggcctctcctcccattgatggccaactaggctttcctctgctacatatgcagctagaggcacaagctctggggttactggttagttcatattgttgtttctcttatagagctgcagagcccttcagctccttgggtactttctgtagctccttcattggggaccccgtgtttcatccaatagatgactgtgagcgtccacttctgtatttggcaggcactggcatagctttctaactgcatataattgaaaagctaatatataactattatttttatttcattcaaacttttaaaatatttagttaagattcaattctcttttgaaataaattttcaacattttatcattccattacttaccacatttttaagaaatgtaattttcagctttcaatatatatccattactttaatttaaaaacatttttttctgaatgtcattaaatagaacattattttttattagatattttctttatttacatttggtgacttgccatggaaaaatgcttattgcattttagcgtttttaagtatagacaaggccaacagaagtacctgcaagtccacttcccaatgatattttatgtcctatgtgggatatatgtatattatatacatatactgaggtgggcttatatacatatagagaatatttttaaattctctacaaaatttagtatttaattttacgttgtgaggacataactattataacaataaattatatttgatttacatttaaaatgctatctccaaagccccagccccttatccccccccccctcccgtgccctgctccccaatgcaccaactcctgctttctggccctggcatccctgtactgcggcataacaataaattcttaggaataaatgtatttaataataatgtaaactaacagaatgttataatagctgtaaaatgacgcacagatttgatttagtggaaaatgtgtttctcaggtatttttgcttttgtacaaatttacagattaatttgaactcacagatattttgctactaaaaaggaactggattaaaatctctacttttcatccagatatcccctttgtttcccatgctttgcatactgattcatatagctcaggtctaaatagtttctgagacaaaatccacttataagtgaatgcaaactatggtacgtacattccttatatgaaaatttagaagatacacttaaaagtcttgactatgcgagtctttactttgactgcctcctttccacgcagcttactcgtggctcccttaattattttacgatttagtacacatcccatcagggttctaaaccgctgctaattccatagatgaacagaaagaaaagtttaaatggggaaaggaatgtgttttcatatatacctctaaatcagcttctgttttttttttatgttttgtttagttttgttttgtttttaatggggaaagtatcagtgatccagaatgcaagtctcatagttggatattacacaagccagatagagctataactctcgcgaatggtttcagtatatctgttccctaagaaagtagctgctggtgtttaacatggtgaaggcactgaatatctcaatgtcacagttaaaggtcactaattttataggacctgtccttaaaacgatggtgagtgtatgtgggtgtgttattgtgcatgtgggggtcacttgatctaagtggctgtcgtgttgtgaggaaatccatgtttggtctgttgtagtgaaaaaagatggatcctttgcttatgagccagctaactattaaagtttttaatcatacatttcaagtcaagaatttccttggaaagtatgggtaaatgtttaggctcttttacatatgttacttaacctagaatgtgtctctatgttcacacaaagaagataagaacgtggatataaagatctttagggtggcatactgggtgaggccccactctaagctcccgaaggaaggagtataagccatggactaagactaatgatggatgtgcatctgaagtcaggcaagaggcatacttggaatgctaaaggagtaaatgagtgtagaaatggtcaaccattacatttaggttccatactacctctagatatttccctagtgacactggtaacctttctgggatagtaattgctcatgagcactttttcaaagtttattagtaactagttttaattcatttataaaattacatttagaaaagtccaaatacaaagtagctgaaatttttctgctcatacgagctggtgacaatctggaaaaaaagctaaacagagtcttccctgtggttctgaatcccctgacatttaaaaggtacagatgtcattaatcttgtgtgctctcaaatatgattgcaatttcagatcttccctggcaagttgattgacattctttataacttaaatcaattttgaattgcttgtgtgttagttgttagttgttttagatatatattatgctataatattgtgactaggggggatatttgagtgtgccacataggacatactataaacaaatatagcattatgattacaatgtatttttgaaaagaaaatgcaagtgtacatgagtaatgagggatcatggagatttactcttcacatgtgcattataccctggaactgctacttgcaatattactgcaagtataaacaaatgcaacttgaatataaacttgagcaactaccgtggctcacaaatgaaggatcactgattgtgattaactggagacgctgctgctgccatcgataaattcctgaaaatccctgacctactgatatgtgcatttttaccaaaatgtctgagaatgtgtgagaataatttttggccatggagaaattaattaagtataagtttctgtgttttatttcagttgacagataactaatggagataaatgaattatattttaaaaataatgttttagcatatacttgtcactgaacaaaattatttatattttcatttaccttttccatcatttttaagttccattaaacaaaaaactaaggtgaactgaaagccaaacgtataattgtaattacattctagctttacatttagggcataaaactattcagccaaaaagacacataacctttattaccaataccagtgaagcttctcaaagagtgagatagcatatgcaaatgaaaagaccaatgagatacgagagttataaatacatatttgaagactttgccctagctttggctaaaacattagagaaaacagttcaatttaaacctttcactaattaaaaaaaaaagtacaacaagtttttcagtgagaataaaattgggaaaatctattttgtaagttgctattatattatccgtaaaaaatattgaatatgaaaatgctacaaaccatattaaaagccacgacctgcttgtatggggctaaatcaatagtaagaacctaaatgttctcttgctttaattccacagtaaaggttaaaatgctttgccttttgtgggataccaatgggaaaagcactgcaatctcaaacattttcacaaatgtgtgcggttatagacaaatgaggaaaacatacatttatttccttaagacattctatatgtttgctccttagtatttggacctagacatatcttgatataacaaaagttaaaactatatatttccagtcatccaaaaattgcatatattaatcaagaagctttattcttttgacatttatcttaaatggcgttatgttcaattatttcatctccagttatttggcagacttttaaattaaaagcattgatgaatacatatatctaatggtaaaaatattgcattacattaatattcaggtaaattcctaagttagaattataggacacaattgccaatgttgatttgctctataccacaaccgataatcagatagagtttattaaaaaaagcagtggataatgcccatcccagaaaaatgcacacatccttatttagttattaatttaaaataagttttaatggggtagacatagatctagtactccacactcaccttctttcttccagtcatagttttcatgtgtctaggattggggttgcaatagcacgaaaaagatacaacatccccatgtataatacacacttttgattgatattatttggcagatgtaactctaaggtcttctaaaactggttacgaatatcgaagaggttgaaagatcccactatattaccatattcaaccatgagaccaacccttagctagacagaaatacagagagatgagtgtgacataatacaactcaaacacaacatctgagccatcccccctgacatgctttgattttatacctaatcctcggtccccttggttaccagtgtgttgttttctctgtagggtcccaatagctgactccttatttgcacagacattcatagagctcaatcccatgtgagcaacctacggctctaatattaattatgagtgtctcagagtcacttccacttgtcactgggtgtaataataagataatttcatgtcttttttcccccaaattaatcatatgattttaggatttcattatgtggtaagaaattttacactgtcaaaatgaagaagtgatgaagatcaccaggacccatcttctctgtgtttgaaacttctggaaaaccagccattgttcatgtctgtagttctgatatatgcagtctctctgtgcccagggatctatatgatgtagagggttacattcaataaccatcttctggatattacgattcacttatcctaataccttccttcttcctattcacaagacatggaagatattaactaataccccatattatgctataatgtgttctgtgtatgacatattatagatccactgagttattggaatagagattgacaatcgaaggtttatggctcaaattgagctggccattcattttctgaaataggattattgaattacagacatactcaatttcattttcacatattatacatggttggttaagaagctttgcacaggctcaaatgactaaattatgcactagttcactttcatgcaggtttcttcaccaataattcagatagtagggcaccagaaaacaaaacaattgtcatcgcctcttagtgaacatcaagaaagtcagaatggtaagaaaagagaatgagagacacgacagagcagcataatggaaacatctatttattttctatccccagctcatcttgcctgactcagctaaagaacatatgtcacaaccgtttaaaagagaagcagaaaaattatgtttaattgctttaaattgtttactttgtgtgtgtgtgtgtgtgtgtgtgtgtgtgtgtgtatcttagaagatcagaagacagcttgaaagacttcattatctcctgtttaatttttggtctttggcatggattttaagttataagacttggaggcaagtgctcttccccactgtgccatagaggcagccatagcaatttacattcttaagcaagcccttcaattttttgggaaagtttgtagccaaaacattaaatttgaccagaatttggccatgggttatctattaactcagtttaaactatgtgtatttgcatattctgtttttttttcccacaaagttttactttgtactactagtatgactaacaatatataatgacatagataattttggcatatctctaaaatatttcaatactactcttaaaacctatattagcatattcataaaaaatactagaatgtacatctctgatcacacaggaaatcgaaactgcaaagtgttagaatgcctctctatgtcaaacttcatccatcaaagctctagcagctaaaaagtctacagtttccccaaatatcactaccaagggaccaagtgctcatgtacctgaagttacagagatattttttttttaattcaaatgctcaaattgtccattttcattaaaactgagatatggaacagttttcaaagagataaaagctatatgttattctcaatcaatgtgatgtgttccacagtccttaatacatctaatatttctttgtaaatgtttaagagatctaattaggcctgggtgaacatatgccaatacccattgaggcaaagagtaaacaatagcaaatagtttaattgtagctagttgtgtttttgttttaaattgtttttcaggccaataattttatcatatacagaggcagctcaatagggtctggtaggtatatcatagtttcagttttcttagagagatatatttctgtttctgttctttctcttgggcctcagggcttcagtccttttccctctctcccactccctctcccctgtccctccctaactcctcagttgtgattgctttcttctccctcccaagtgggacttcacttgggcacttcaacttgttgagctttttgagctctgtggactgtatcttgggtattctgtactttttaatgggtgttacctcactcaggatgacattttctagttccatttgcctgcaaaactcagaatatctttgttcttaatagctgagtagtatcccattgtgtaaacaagccacattttctgaatccattcttctggaacatctggcttgtttccagcttctgattatcacaaataaggctgctatgaacatagtgaaacacatgcccttgtggcatggtggggcatcctttggatatattcccaagagtggtatagctgggtcttcaggtaggtctatttccaattttctgaggaacctccagattgttttccacattggttgtactagtttgtaatggactgaaacaaagtggcatcttttaaaaatgtaacaaaggtcagggaacaggcctctactgaacctctggtaaacaataatgcctgttgtagtcccatagcatttctagaccagtgggatctagaccaacatcttttctaagaaaggatgctgtagaagtcagggtaagagggcttttgtagagatgcctcatcaacctgctgcagctcagaagccagcatacaaattctaaatgtttgtatttttctccatttgtattctaactctctgtttcctgttggtccctattactgtgggacccactgaaggcctgggataggagactctgttgatttgtttcatgaagttcagcctgcagatcacattacaggctgtatcctaagtggggatcgcccccggagggacatcaaggaaatgatcagcccatttactttctatcttgacacatgaaatgttccgtctcacctttgaaaattgtatggtcttccaaagctgaaaacagtaatggagaaggtaaattgggaggtctttctataaagcaattgaagtgaatgcgcgatgagtgaatactttttgcagagattgtctgagatgcctgctaatgactattattataccttgttctgttatgtgtctggtgagccaagaagacaagtgaggttgatagacagtgcagaccaaaatgtggcagcccttcctagcatcacctgagagaaagaagtaaacagaggatttcttctccaaataagcattcatgcatatgctttggaggaacggtttccatggtgagaaggatactaggttgtgaagtagctgagggtttcctaatactgaacttaaatggctatttaatttggatggtcaattgattgctttaatcaaaccatgctcctgcaggtgtttctgtaatagcaataaaacactccactgttaatgctagttgtaggctgcactgataaggaaaataaatatgcataacttgatagatgctccagtattctagaaaaccttaattagtgtttttggataaggagcagttagatactgcttgcactccattttatctggactttaagagtatcactctgtgatgaaacccactaagttggtttgggtattttggttgcaattgaaatatttaggatgttattctaaacagtttttagcctatgttaatatgaacaatagtgtatagttttataggtacatagatttattttatcatatggatttacctaaatgcttctttggttcagattttgtctttattttattatagtgcatcactgcaaaaataacttctcaggaaaattagttgggaaggtttctgcatgaacacaaattcctgggaggttttttatgaatgctttacctaaaattgtttgttcttattgcccagacctttaataatacagaccctaaacatacaacatctgccctcaatccagatgtgctgcttacccactgcatggacatgagaaggtgattccgctctgtctcatgttcctcatcacgaaactgaggaaaatatcattgccctcttgaggcttttgaaaactgaaactttttttattaattacaaagtacctagaatgatgccaggaacaaagggagcactagtgaaatcttttttgctttccctacgagcagatatgaatatctaaatacccagaccatgagaacatgtgtgtgtgggggaagggggggaggaggaactctaaattcattagaaaattgttttatactgaactggggaaaaaaatcacaatatacccttaatgtgtagaatattttgatacaggagtagaacccgctgtcttgttgcaggacatagcaacttatcaaagctattgggatggcaaggatattaattcgtattattttccggtcagcttaatgagtgaaattcaaatttgataatgaaacatgtgaagataaaaataataaaaaaaacaatagaaaagtttaccaagtgagttttcccatgcatttgagaattggcagtgtgtatccctcactgagttcacattcactgacattattctgaagtttcataccaaggagagaatgaaagtgttaccacactgagtttcactaacgtcatgagtctagtcacttggaagataagtttttaaaatatttactctgctccactgcacagtcccataacttgaaaagtccaactaatttttttgtgttttggtttcctgttttgattttatattaggtaattcaccctattaatatgtatagaaaattagagtagtatttgcttgtgtgaaaggaagttattcataaacccacagaatatcattcagggaaaaattgttgcaggttttttgtttcttttatattttgtttttggtcttttggggttttgtttgtttcattttaagaattctgtcatcccatgaattcctagaaggatttattttttaattattccagtttatcactggcctcattgatattaaatgcatcaaaactgaagtttcttatgtaaaactacatagtatttgcatatgacctattccagcccttctatatgctttaaaacatcaccgcactgtttatgatatggaacacagtataaacattgtataaatcattatgaaacaaactgaggaaatataagaaaagccatttgcacattataaatcataacataatttttcactttgaatgtttctgtctttggcttaatctaattacgtggacctgaggattgagaggcctgacccactgtggttttataactagatattatttactaccaggtcatcctaaaaaaaaaacaacctttcccccctaaaattccacttatgtgttctatgaattgtcagcattccatcaaagttaaagatctgaaccctggaactaagcaaactatttacaatgtactttggcatgttacatctgaataaacataacaatctatcctttctgatacttaaaataggaaagtagatgcttatagtaatgatatacagttttaaaatagtaacttctgcctcaaaagttgagttatgtgtgagctacagatgtgtgagtcctccctatggtctgtttaccatgacaatgcattggtgtctcaactattgcaatatttgctcaagtgccactgatgctactgtgtcatcagcaattagaactgttttctaacacatgaaactcaagacgaatgaaggccaaagtgtggacactttgcctcttcttagaattaggaacaaaacacccatggaaggagttacagagacaaagtttggagctgagacgagaggatggaccatctagagtccatacccggggatccatcccataatcagcctccaaaagctgacaccatatcacacactagcaatattttgctgaaaggaccttgatatggctgtctcttgtgaggctatgccggggcctagcaaacacagaagtggatgctcacagtcagctattggatggatcacagggcccccaatggaggagctagagaaaatacccaaggagctgaaggggtctgcaaccctatagatggaacaacaatatgaactaaccagtaaacccagagctcgtgtctctagctgcatatgtatcagaagatagcctagttggccatcagtggaaagagaggcccattggtcttgcaaactttacatgcctcagtataggggaacgccagggccaagaagagggagtgggtgggtgggggaggggaggaggtatgggggacttttgggatatcagtggaaatgtaaatgaagaaaatacctaattacaattaaattaaattaaatttaaaaaaagaactgttttctataggttattcttcaaattcatcctgaagtatgtgtacattgcatataaattatagcacaaatgaaaatacctatgatatgttataaaataacatggtctagatgaattaattttgaagaatagtttgactgttatagggtatataaacaaaccacaacaggatagggaagccagccaattttttttttcaaaaccacatttagtatagagaggacagtttctaagactaaattcttagagtaaaatttatcatgttcacaattgaaaaagaaaataggctcatttttctcataaaaacattcacacaaaagtgataatactgtagagtgaatattacactagaagggagggggtggtggaggggctgtgtgagctggggatggagaggatgggtctgcagtcaggaagtaaagtgaacaaattaagtaatgggaaaaaggaagttaaaaaaagaaatgtagagaagtgtccatgtttctttctgagtgcacaattggttatttttttattagatattttcttcatttatatttcaaatgctatccccaaagttccctatatgctcccccccccccgccccctgccctgctctccaacccactcactcctgcttcctggccctggcattcccctgtactggggcatacaatcttcacaatatcaagggcatctcctcccattgatggcctactaggccatcctctgctacatatgcagctagagacacaagctcgtgggggagggggttactggttagttcatattgttgttcctcctacaaggttgcagacccctttagctccttgggcattttctgtaggtccttcattgggagccctgtgttccatctaatagatgcctgtgagcatccacttctgtatttgccaggcactagcataacctcttatgagacagctatatcacggtccgttcagcaaaagcttgctggcatatacaatagtgtctgggtttggtggttatttatgggatggattccctggtggcacagtctctaggtggtttttccttctgtttcagctcagaactttgtctctgtaattccttcaggccatattactatcctctattttactttcccatttaaactctaaagaacatacccattatacaattccagaaatctatcctgggagcataaactgtaaagtaagtattaacaagtgtatctgagtaactcctgatagctctcaaatgtttttacataccttcatccagtacaaaatatctcaagccagagctcatcaaatgatgaggggtttcttctgatgtgtcgcaagggaagggaagtggctgtttgtttgggcaaaggagacccaatagttccttgcaagtaaaccagagatgacttgacaacaactgttctcaacttctttgatcaactttggagtaatagccagacactaattacaaagccgatctaaacctggaatgcgttgtcagtgtatgtattaataaatattaaatttttatgagcaatggataaagggattgcaatttctaagccttaatagatataatgctacttaatattttatagttataagtactaaagatttgctatagctcagcatattaataaactacttttcatacttatacctcatgtctttacccacattgccataggaaaactaaaatagccatatgtaggttttcccattttaagacttttcatttacagaagcaatctataaaatcatgatttttatgttccataaaaggtgattctttaagatgtctcagttttacagggaaaaataataacagtgagcttcaatacatgacacatgcacttaacctcaaatctagttacagttttatagaagacaaagaaatggcatatgagcattttctgaggctaatgagagtcttagcagagatgacacttgaaacacattctatgccatgattaataatattgataatctagataaacaggtagaaattctagaccaacaacaaactttacaatcctttggaaaatgttgggggttgtaggataatggatgcagctttctaatgatactgagatatacgtaataagaaaacaaatggtcatagatcagcctaaatgatcaaatagctcaatattcctatcttgttctctctctgtttaggatatatgaagaaggcaggcattctgcgacacgggttacacatagaaaaatgttattctcattatagaatgaccactttacagcaaagttatgatacatgactctgatgagaaatattatactatcctacttgcaaatacagaatgtttttatgggttagtaggtagaaactaaaaccatagtaaaataactaaaaactaaagcacagaacactaggcagaagtgcttttttatacacataaagaatttacatttaacagatgatgctcagctactgagtatagggaaatatttatgtgtttttgtaaaggaaattaagactaagtccaggttggagataacttcataatattcatgcttatagatctgtttatagattgtttcgtatagagacaatctcagagaaagagatgctccaggtcatagcaagaaagattttgtcagactgatgaggcactgggtctatgttgttcagtgagtaccagccatgacactttaagtcctgaaagaatcatggttttccttccattcatctttctcatccataatgtttccttttatttttcagactatgagagaattactttctttattcttccttatgtctttcccattccgagaatccagtcattttagctatcactttaatgccaactttcagaggaaaaaaagtcaactcagaaatttttcatttcactgtagtaagcaatgtcttctttagtgcaatgttttttttttttattggatactttatttgtttgcattttaaatataaataaatgctttacttgtctcccctctacaaaccccctatgctatcccccctccccttgcttctataagggtgctaacccacccacccacccacccaatcttacctcactgccctggcattcccctacactgagacattgagccttcacagaaacaagggcctctcctccctctgatgctggataaggccattctctgcaacatatgcagctagagccatgggtcgctccatgtgtactctttggttggtggtttagtccctgggatctctgaggaatctggttgggtgatattgttgtcctttctatggggttgcaaacccctttagtgccttcagtcctttcccctaactcctctattggagttcccatgctgagagcatctgtatatgtatttgtcagactctggcagagtctctcaggagacagctatatcaggctcctgtcagcaagcacttcttggcatcagcaatagtgtttgggtttggtttggtgtctctatatgtgatggatcccctggtggggcagtctctggatggctttttcttcagtctgtgctccacactttgtccccgtattttctccaatgttctactgacaatttttgagtctatgctcaccagaaaaattattgtaaaactttcttctctctctctctctctctctctctctctctctctatatatatatatatatatatatatatatatatatatatatatatataatataaaaatgtctctcttaatattcccttttcatatctgattttattgagttttctatcaatttatttttggttgatgttgctaatggtttgcaaaacttgttcatcttttcaaaggatgaactgtttctctgattctttgtaattgttttcatttctgtttcattaattctagcgttgattttcattatctctgtgtacttactgttttcaggtgttgtttgttcttatgatctatgcctttgggtttgtaattaagatattaatatgtgatctcttaaaaaatttgaggttataatttaattatgacatttctcccttccctttcctccaaaccctttcactgctgctctccatgttaattcaaattcatgatctatattttgcaagtttttattgcatgcataaatgtatatatgtatatatatgtttttgtttatatacatacaaatacatatgcatgtgcatgtgcatgtacatgtatatgtatatatatatatatatatgggtgggttgggcgaatgtatatgtgtgtgtatgtatatgcatatgtatatattcttaaatatatcctgctctttttgtataatgctacctgtatgtatgtttatagggcagattgtttggcaataaataagcaattcgttgttcttcactagggaagaagcatattagtttcctggtgttatccttgttcagcacacatttgggcagtccttttgctgtgactttatgagtatagcttttgacattactagaatacagtctcacagaaaacttcctcatcttctggttcttacaatatccatccaccccaccccctcgccattttcacaatgtttcttaaaccctaggcattcatactgggctccacaactctacattttgattggttgtggtctttatacgttacagagaggagatgaggggtgaagactacacttaattctgggtaaaaggacaaatgtttgcagactcttatgagagattatcctctttattaaatacttgtagattctactccagtatctgcgacttctctagctaagcgaaatttgctaggtattaaataccatacgggatctctctcttgttgaacaggtattaagtctaattagaaaccagttagttagtgccaaggtatttgttccagttctgtatctgtagtttcacagtgccatactgctcgttgaagtgattcataggacagagttgtgtaggacctttggtagtcttcctcccttagaaacatgtgtggcaccttttgctactgtcaaagctaggcttcagggagacgacaatatacaatccctcaggactgacttcattgtgtcccatgagttttagtgtggtgtgtttccaccatatgaaattttattaccacataataatatgccaaaattatttttcacatttgattcttgatttctcttttgctccagttttgattgagtagtacattgttttgatgagtttgtatagtttcagtggtttatattgttcttgttatttgtccagctctaatgcctctacagtcagataaaatgcagaatgttagtgtgattttcatatatttgttgagagatgctttatgtctagtaggagactgattttgaaagactcacggtttgtgagaaaaaaaaagtattctttagtgcagggtttcataagagtatgtcggtcccattttgtttataatgtcatgtaaattagagttttgctatttagtttgtgtattgatcagaatcaggcatcttggtatccactaccactgtgttggattcaaactttggtttggggcctaatcacattcctcttatgaaataaaatgaatgtgatttactgaaactaccagagacataagagaagatgtgtctaaacagttacaatattttgggggcccagaggtgattttatagtagaccatatgaatcctatctcacaagagttatagtgtaattatgttatattgcatgcaggtaatttcaacaaaaagttgataaagcactgcgatacacacagttagaaatcagaaacttctgtgccagtgtagaaaacttatgtgctttatatatatctggaaatggatagcctggtttaaaatcatgtttgctaatcagtaggcttcctatatatttttttacacaagaaatctgtcatcaagacacttgtcatgtcctctagactgagaaatattcaattggtactgttcctgcttcttatccactctaggaagtagatgatactttttctatacattttatatacacatttttgtttaaagtgtttatctaggtctcatattgaagttaatattagagtcttcaaaatgtagtacaaggttctttctctttattagaacactcaaaagcacgctgcttttctttgtaactatatctactctaagatggtaaatatgagggatgtagcgctgacaggtagtgaggtaacagaaacataatgcattggcttaggagaacatttgataactagggaacaaatagctccctagaagatcattgtctccgggaatgttttggaacaaggagggagagacgaaaccacagtacacaggaacctaaaataatcttcatcaggactctggcatcctgcctcactcttcttccaatttccagaatggagaaaattctgtgataaacaaggaaaaaatattacatgctatatatccagagtccagcaagcccatgtcagcatttaataaaaataatatgattaaatgccagggaattaagtattgttttggtatagaaaacaagttatttgttacaagacataatctttaacttaagaagtaaaagaaaagaaaaaataatcctcaagtaagagaaaatgctatctctgtctccctcactgtctctttctgatgctgattttatattgcgttatgactaccagtataggctaccatgtattattatcataagtagagtttctcaacaaacatattgcatatgataagttatttcaagcttccaatgaataaatgtatcttacagaaagagatcctagattattatttatcaagaagatcatataaaacaaacaaaaatattaataaattatagcagaagatgaaatattgatgcaactaaatattctaggataatggagttgtcttagtgactaagacgcagagaaagaagtcaaaacccgaagaaagaggaagttaattttcactttccctgtttgcagaacatttgatattcactaaaactgtgaagaatccagcaatggaaaacacaagacgctatacattctaatggtataatttaattacatcataaactattaaaacttgcctgtctgagaacaaagaatctctctaagaactaaagactggattcaacaaagtcttcttcttcttcttcttcttcgtcttcgtcttcgtcttcgtcttcgtcttcgtcttcgtcttcgtcttcttcttcttattattattaattcttcttcttcttcttattattattattattattattatcactattattatacatatttaaattttaaggtagtaaggattcctcaaaatggcaaagatacattgaggataattcatacactaaaagtttatattttatatgactttataaaggtaaatgatcctatcagtcttcttatgtatagatttttatggctaagtatagaaaaccagattataatagtctttctagtattacatcctaggacaactagttactagtagtgtaagcagcctctgcattatacttttactggaatggcctcttcagcttctgtgactgctcatctctgagcagtctcctcagagcagaaagacagagtcataagacaatcctgtcacctatgttctttgctctctcaaagttagtagaaaatcattacctaggggtcagtctaggtgaagacttctactcaatatttgcctttgtttaattttccagcttcccgagcgctcagccttttgatttcaaaggccttatctttttcttttagctaaaacagcaaattttggaagtaataaatatttccctcactagctacataaattcagaaagaactaaagaataacagaggaaaaatgagttaatatattggactactcttgtgtactcctgctataattccatggattcatataattccatggatccatggtgtttcacagtgcttgttatgtatagcctttgttggtatgatgttatttttttagtcatccaactttattttagaattatacaggacatgataattgagcaatcaattccaggatgtggtctaaattaagaaatacttgtagtgtgtgattcaatcattgtacaatatgaccatttgggattacgtatggtgtatgattatttcttatgtccatggtattctcttgtatattacttcaaacatgctctacttaaaaaagaaagaaagtcctgataaattctacagcagtattctgacacaaatgtgcaaatgggaagcaatctgaaatccattaatcaaaatagttcccattgtcagtgaaatattgttacaatttatcacatgaaaatatatgggtaatttgaagttgggaagttgaggatcgatggaggaagaagcaacatccagaggatgaacaagagacctgggctaaacaggtcaagttgtacctgctgatccacaagtaaatggccagcaactagagagtcatagatatctctcttaggtctttgggtccatttgaaaggaccgcatctattgtacaagaacactcagaaatactggtattgctgttgtttcagatattacacattgaatatattctttttcatattccttttttctcttattatttttctgctctttcttcctctctttctttcttgagagtcttcaatttatatgacttattgaaagtgcagtgcttgtctatagcttcgactcataattcaagtaatggttgctgagaatctcaccaaaggacagcattattttcaagtaggcaaatatgggttcataccagtaaggcactttcagagttcagaagaaagatctttagcatcagtaaaagtaatatgaaagcttagaaactgattacaggcaacactgataaggaaatattaaaggacatcaaagggattttcatgctaatggaagagcaaatatataatttccagaaggcccaggtagccagtctaaaatatgctgtgtgcccaagttaatagcctcatagaaaagacattgctcatgttgcccacacaagtgagttcagctcagatgaataacgctataacaggtaattggaagtgctcttacccagatcagaatgtgccgtaggaaccattagcagtaacacaatgtttttattttgtgttgtggtttttcatctttaggatttacattgcttttattaagatggatcttataataaatgcctcaactacatatttctcaggctaataatgatgaccctataacaaaaggcaatggccttacgtatctctgcttatcggttctaagtagaaaaaaaatcatgtaaatggatttctagacccataaaattatgtatgcacagtattctaaggcttttataggaaacagtattagtatgctcttatcaatcataagagggagtttctgaaattcaaaattgcgatatggtcttctcaaattaggcttagaatttcaaaacctcctagcctattagtcactttttaattattcaaagttaatttttcatctcactttaatttgaatattcccaacacataaaaatgtctcaatgtttaacaaaattatttccacaagatatttatgttgtttaaatatattgaataatctatcttacatgctatataactggtaggactccaagatacagcaatgttataaaaataaagaaaattagtatactgaaagtgaatttcaaaagtcattattcttatataagcttatgatcagacattataaagcattggaaattggctacttttctgagacaggttgtcagatgccctcccctttccttttgacctctagttgtgggaggtcatctttgctttttagaatcagctgatgaccaaattaactcaagtgtctgcattgtgtctttttcttgttgccttgacaaaatgcttgaacaaagcaactcagcaaacaaggatttgttggggtttagagtttggggaagacctgcaggctcctatatgagaggcagatgcaatcaggaagcacggagcaatgcatgcttgtggtcaccttgcttttacatgtttagctcattgacaccagtgcccatatttaggttagagtcttcttacattaatgaactcagactagaaattacgtcacaggcacggccagatgtttgtctcgatggtgattctaactcgcatccagttgatattcaaagataaccataatacttctcaaagtccagcgcttggctacttataaattttggaaaaatagtacgtggttgagaaaggaaacacaaataaatgtacagggatgataatgattctacattggacaaaaaagactcagtatgtttgtattggtctgatagacaattagctgttaaggtgatggatcttctcactgacaattcctatatttttctaaaagccattcttagtgaagtccttcaacagatagagttagaacagaagtaattattggaaaaactcattcacacttccttcatgagcctcatgtaccttggatatgtctgcttttatgtactccactaaaattatatacctttatatgccaatattctatcaatttcttaaagtcagtttctgtgctctgccttccttatgattttttgtagctatataacttaaaagtaccaaaataatatatatcaacatttttcttaaattgacctgagaaatggagtttagagaagaagagaaatggagtttagttagagaagtttttcagctttatcattaggtttccttcctcctaacaattgcccaccactaatgagaggtggggtgaggcagagtgtacagagagggcccatttgtttttgatagacatatcattatttattattattatttttatattcttggaaaataatagattttagtacagattttcatgcacatttgattttcttcttatcagaaaagtatctttgtaccatccaggcttttcttgaattcacaacccccaagatatttgtatttcacagttagtagccaagaactttatatgaaggaaagcatatattatctgtcaatcaaaactctgattattttgtttagtctaatgtctttgtagtttcatcaattttcttgtgaacccaattttttataggcttatccgttctctgtcaacaaaggatgctgtgcactgctttatacttagcttgggatattgatgagcctgaaatcagagtgtctgtgatccagcaatttagttcatgtgcatattcacaacacaggttctgcctgtcacaaggcagaaaggacatcatctctgatattgataaatctgaacttcttcccttatgtgcagcgtgtaatctcctaaggtctttcttggattcttcagctacattggaataacaagtccagaatttgattttgatatcgtaaacatgagacaagaaagactctgtcttcctaaataataggctttctgctgattattgtactgtcatcccaccccaaataaaacaaagtccaaaataactttgggtgaccttgctaaaataagagagactctttttttttttaaaaaaaggaattattagtcttcattaatatctcaacatattttcaggccatactaatatacttagtacaaagaagtttttacatatgatagacacttaataaagattttagattttatgggtatctgaatagttcttatttggtacaaaagagagctatcttgctttaatttccttttttgatattctgtcttgtagtcaggattaatactgtccttgctaagtactccaattctttcagcttcaaatataataactacaattgtgtaaagatataaccatagctatggattgttattgcattatatataatactctaattcaaagcaaaaatattcttgatataaattatagggtccaattttttctgggataaatactacaaggcacagtgttagatatgtcccatgacatctttaggaactgctaaaagcaactctcctgaaatgcatttttaaaattacaatgaaacaaaatgttggtacactggatttttaatcttcttttttgagcagtttcatccatacttcaaaactgtccacataatttgaaaattaatccctggataacttttgaaataatttttgacatttttttaatattttgataaattagtttatagaatagatacataataatcttgtatttttcagtcaagagatatcctcatctagtttcttactaaaacttacacgtgttctcttttagtattatttttaaagttagatactttttattaattattaactatgtattttcttcatttacatttcaaaacatgcagatatttgaagttataaaggtgagactctaattccctttgactgtaaaattgaaagatagtttgaactaaaactgatcttgagaaatgaaccttgaaaatgaaatgtatcaagagattctaatcacttagaacctttaaaatttgataacaataaagcttaggttgagaaaataaataatcaaagaataatatgttgtaaaatgtttcatgttagaatatccaaaatgcatataattcaggtcttgccaaagcctatacagaaatattacattaaagttatttttaaattatttgaaatacataatatattaaaatatcttcaacttattagtctataaagcattctttattgtttttgacatatgcatcagagtacgcatattcttctattggtattaaaatcaatatgttgctgattgtttaagtgtacatatagacatttttaatttttattttctgataagttgtctccaaacacataaataatttaatgttcttggttgaactacactaaagacataagaatgtagcgccatacaaactgtaatatttatattatgctttagagataaactatctgcctctctgttctttatgttcaaaagaaaaggccatcacagaaaagtgatataaaacacattctcatctttgagttactatgcaaggattcaaagtctacaaagaggaagaaaaatgtctctagtgaactgtgaaagaagagagtgtgaaaaagaaagaatagaaggaaggagataaacagagaactgaaaagagtgcagtttgcgtttgagttttatgttggcaatgaatttaaaatgaatgaaaagaaaacacagattttcacttataaaaaaagataattttggtgccaatggttactccatagatacaggaatttattaatccaccttttgtctcatgatatatggattatttttgtcttgacaaacattttgaattcatggcttccgctttgaagagaaatttaatttatatctacaacttctttgatttaaaaaaactgtagatgttcagaaatctttatgtcctgtgaatctgaagcgtaattgcccacactcaggtattacactgatagaaatatagaaatctcaattgtttacattccatagatttgcagttctatgacacagtgaatcagaaaaaaaagcactcacgctaagtgttaaggaagaaggtcttgttctcataggatgctctaagatcttcagggaacagtcttcggggaatatactgggttctttttctgggcgctattttgaacatagaagttgactgccacggaagaaagctaataataaaatggaaaaaaaaatccacaacctgaagttcaagacagtccaggaagttgagatggaaattgagagtctttaagaaaataccccgcggctctgagtctgactttctctgcaacccacacgaagtcttaaaaacatgatgacagacctgagtgttcacacaggggcttacggagctgagacctcactgttaaagataactgctattcgggagttataaagagtggaataccccgagaagttatgtctggatagtccctgtttggcttacgtcaacagggaacataatacattaacaaaaatagaaacgtgtgggtggcttgggcttcagggagagtataatacaagaacggagacgccataacccaagatatctccagctgctgttcatccagcaggcttacaagctctgagggtagagtgtaggtaatgagaatctcattaccttgatgtctgtcttctctttactattatgtctgtttccatactctgatcagtgcattaggatcgatgaatcacactgttgcatggtggggtctctctcttctttctcctccacatcttcctcagtctctgatgaggatgacaatgcttctctttacactgaagaaacagatgacatcaaaggaggacacacctgggatgccaaatgtatccaacaggtgctgcttttatgcatacacttgtgtccctcgtaagtgatggctgtgcagtgccaagctccctgggacatcatcccctcattgcttctctttcctttctccttgggtcagctaactttctcaactagatcattcccaaaccatgtgcaaataaatgctctataatattttatatattttaaaatataagcttaaagcccacttttctccccatatcatttatccctgaattattttgaggaattctctaacgtactgtattacacacactgtctcaaatttcatggcatcagactgactttactgtccctgctaagagcctgactacttgtttttgagcctgaacacaatcaacttgtaaataatatttgataaagttgaaaacccttcctcatgaaatgcttgatcttttctgaggacctcactctctatttcttttagtattattagcaagttgagcttctctcctatttccttgatggatggtgtgtacttttctatggtgtaattcttaattcacttcttttcaaaattgagatagttgtctctctgggttgtattttattgtgcatcttgtattgatatattttacaatatttatttttgtaccagaactttcctgaaagcttcactcataggtactgttttgcataatgtgagtaggtgcatgtatgtgtgcctatgtgtctgcttgtctgtctgtgggtttgtgtgtggtgtatgtatatgttatgaagcatgtttatgtgtgcatacctgcatatgaaagggcatatggagaaggttggcacttggtgtcttcatttattactacttccttatttttaatgtgtttatttatttacttatttatttaatttactttaacttacctccacatcacactttcccctccctattcttctcccagttcctctatctctctgccctaaccccattgcccctatccctatatcatcagagaaggaaaggcctcccatagatagtaatcttcctttttatatcaaggtgcagtagaactaggtgcatcttctcctattgaacctagacaatgcatcccagtgagaggaaaggatcccaaaggcaggcaaggggacagtacttcagtttgcctagaatggctacctaatagttctgggatttgcctatttcccattttctcctagccatgaggttacagatgtgcacttccatgctagatgtgattggggggtggggggaggaatgggggagtggggaggagtgtgggtgagggtatgggtgtagatgtaaggctctttggtctattcctcatgtttcccccaacaaaacctttgcccaccatgttataccacatggccatgttttcagatatctagttaatatcatgcagtcccttggttatgttcaaagtattcccttcccatcaaagcaacccagttgtgatacacctacagatagtttctcctcttattggtacaaaggcaccatttcagttgcttaggccaaacagacaaggggaagcacaaaactggtttaatacctctcccacgttacaacatgtttcctatttaatggtaattcccataagactacaacttcaaaagatggtgaagacctagaaactttgctgtgcccaaatgcctattatccttcatgtgctcaaagcttctacctgctttcttagacttcatcacatttgttctgtagcacaggttctctgtacctcagctgccagaagaaggagattctgatcaatctaaatctgtgttgtatattgtgcccaaatggttttcattgttttctcactcagagagagcagatgcagaggttcttcaagcagcctttttgagctcatgtgtcttcttcccttcacttgagctatggtggtacctttagtatttcttggacatttgtaacttcaagcttgcctcctccctttttctcagatggtctgctcgttaaactatttcttaccatcctatgtctctctcaattcttcaaacactttaatctccatatccctaactatgaatattttggcatcctgtttccctgaggaaaatatgaagtccctgaaaaaaaatgatgtttttccttggctccacaagaacaggagcaaatgttgaaggttgaggtttttatcagatcttatgagtgattttcaccaaaacagaacaaaaaatcgtgtcaatacactactaaatatatagtggtggttattccatataaagtcaaagctaaaagttgtcttccaaatattgtaagcatattgcccaaagcatctttttatagaggagattatagtaattatagaaaaactagaattaacctaaattaacattgcatggctggcacactaatactatacatgtgtttaatgggataatagtaaatccttactgagtgctaatgtattcacagtcatcctaattaatttaaataacagtcattattatatatttgataatttttattcactgtaagcatttgcataacttttcatagttttaatatctacagtacttcgaaaaaaagaatctgttctctaaataggagatatgaatagaataaaaatgtctgaaaatccttgggtatttgtcttttgttagactgtgtagtgttttatcattacaaataattagtgtaaataattttctgttcattaatatctatttttgtttaataatttttatctgttatatttctagaagcaacacacaaaaacttttttaactctttattcatcattgaaagttttctcatgaagagcaagagcaatttatttttatttctagctattttaataaaatgcaagtgtattgtcttcataaaatgagaagttgaaaaactttgtagttcatttttttttctaactgtattaaactgtatgtcaaccaaagatactgtaatttctgctatagcatttgaagaagttacatataacaagggagatggatcaacaggtaaggcacttgccaacaagaataatgacatgagtttatccctggaatctacagtagtagtagtagaagaccaactcaaagtcataccatggcatgtatatctgcacatatatacttacacacacagacacacacacaaacacaattaaatgcacagatgaaaatactttcttgaagtattggtctattctaaagtggttgattttgtagggaaacttaattacaataaaaaatgtcttttttcatatttatgggatttcttgaggaaaatgatattgcactagaaaacatgagtcataaaggaatcctgcaatctctactgttatctccactttattgggtaccaccctcaatcacttctgtcttcaaactcttctttctttaaagagaaacttatttatggttgccaagctgactcacatgatgttcatacacatcgtgggttacagccaaactgagtgttacttgggctttctaaatcactattagaagacaacgttgaatgtgttctgtctattcattcccacttttcttatctgtaattatgggtagagcaggcaaacctgagaggtcagactgcaacacagaaagaagtactcggtgtatccattacaatcagtactagaactcaatagctcattttgaaaaccttgcttggcacattttgggacataatttgttctaagcattcctttcatctcagatacgactgtatcgatcattgccttagaggataaaaaatatcttcaaacttgacatgcattggcaatatatcacaggcatgaatgttttttaggtaggtagtataataaggttaatatcagtcctccaaaattctgctaacaaaattattttcttagcaatatctatcaatacagtaaatgatttcagggtatcaggcaaagtcctttgctcaaaaacgaaaacaaacaaaacaatgagaaaacaaagtaaaacaaaacagaaaagcatttgtcaacacaatcaatcatgcttaaatagtcctatgccacagtgagatattaaacagaaagttttgctaaccctacatctcgttatatacaagtgccataaagccgacacagaaaaaaaattataggtgtgtgtccagatgttaatagttgaagacaaatgctgaggaggaattatcccgaaataaacgtacatgcaaaagcgacatacacttcttacttagcaggcagactgtgtttttcaattttgctgtatctgcagttaggatcgcaagcaacattgttacagtcttaatctgttactaataggcacttttttccctgttgtattcatgagagaatttttcaaaaattatgactagaacataaatttaaattgttatctaaaagactatagttctcatatttactaattctgaaagaatgaaccatggctactataataagtatagtcacaagatagtaaagaggccccttggtcatgcaaactttatatgcctcaggacagcggaacaccagggccaagaagtgggagtgtggggaaggggagtagggggagggttgggggacttttgggatagcattggaaatgtaaatgaaaaaaatacctaataaaaatgcatcatcatcatcatcatctctggactatgagcgcaataggtgaagcactctgaaaacatgagaatctcagccaggaagacatggataccgtgtagactttccatttatgggttcataatgtgaaggaagtgacttcaatttcatgaacccgagtagctatatcagtaaaattaaagctgatgaaaattatttaaatgcatttttagaatggctgtaataaagttgaatgaaataactggacatctatgacccttaaaagggttgagaaccccaaagtaacaggaacagaaagcaagcatgaaaacacgcctccacctatgaaatagaaaggagtgatacccagtacacagaagaacaacctcattattcagtaccattctttagatccatgaagacattcacttgatcctcatcaaatattgaatatttattataacacacaaatatacataatgggcataaaatattattatacaagtgctgattcggtagtttcttgtgtctacagttaagaaattgaaacagttttgtttcatacttgatgttttaggattatcattactggttaaaaacaatggtttaatttgtttaacattaaggataacaattatagatagcagcaaacacacacaaaaatgcaggcacatatacacacaaatacacaaatagtgcattctaactaaataccaaggatattaaaggcttaatgagtagacatgtatttctcatagttctgaagtttgaaaatactaagagaaatgtacaaaacaggctgtttggttgtttgtatgtttggttggttagttgttagaatacaaatatctgtcactcactctgtactcaagagacatctttctatgttctgtgtagattgggcaataaatgtaagtgattccctcactcttcatccctattctatcagtatagccgccgtttaaaaaataatctacatataaaatttatatataatttttctaatatttttcctgcaaatattatcatattgcctggtatagtagtcctctgagaggctctgccagcacctgactagtacacatacagaaactcacagccaagcatcagatggagcatggttactccaatagaagagttaggtgaaggaccgaaggagctgatgggcttgcaaccacataggaagaacagaaataataactaatcagattctccagggttcccaggggctaaaccaccaaccaaagagtatacatggatgggtccatggctgcagttacttatgtagcagaggattgctcttctggggcatcaatgggaggagaggccctgggtcctgtggaggcttgatgccccagcgtaggaggatgctagagtagtgaggcaacagtgggtagggatgggatgtggggggctgggggtggaagggagactaggaagtgggacaacatttgaaatgtaaataaataaagtaaaccgtttaaaaataataaaatacacatttagaagttataactatttatcctataacatgtatggaaaatcatgaaagcccaaattatgaatgtttttcttcttctatcagatgaaaaatgagacttagggtaaattaattgccccataatggtctgccttgtaaggaccagagaccaaattaagtcaagcagctgcctttgatgtctcaggctggcctctttcaccatgtcacattgtatctctaattatttttagaatttaaaataaaaaaaattacttttgatgcaatgttgattagatttgtgccaattgttgtggcaagattttattcatagcagcagaaagacagttttaaaactttgaacataaaagaaaagggcactttgaaaaaaggaacatggtctttgtggtgccataattgtttatattccaataagctgtcattctggtgaggggttagaatctagaaaaaaaatattgaaaacaaccaaatccatttggtttacctgatccagtccatgtcacatggatcctgtcggccttagaagtctgtggatggatcttgtagaagggcgtgtctggagcttctagcactatgaggcttttccctttcattttcaaaaacacagatcaaacttttctttatgtcttcacagctacactactgtacttctgtgctctaacaaccagcttgtaagcaatagcagcactaagccacttctgcaaccaatttgtattcataagtaatcttctggtaacttttatgcagatgaaagcataaaattctctctttttatcaataaaattaagagatggagagttatatgtgtgaattttctttcctgtttgagttccattctccaaaatgagtattaccaaagccttctatgcgttgagctttcttatcccacagcattttaggggacttagagaagacatttaacatatatttgtggttttgttgttgttgcagttaggggttagctgctgacctacctgtaaaaagtcaacactgtggtgaatggggggaaaaacaaaagacttcttgtctttgttctccagtcaggatgtgaatctcacttgccattccctttaatgtttacttccatagaattcttctctgtcatagcttattgggaacgctacctttttaaaacttagaatatttaagttgtcatatacttgtgttatcaacattatgaaatcctgttgacctttttaagttcccatatactcactgatcattagttaaggtgattctgacatggggcattggaatcagggtcttccccatgtcaagtgggtcatcattctctatgatcttatctgttatccctggttccctaatttaaaaaacaaactaaaatacaaacaaaaataaccaccagtccgtctaacagcagtttattcagcaaacttcagtcttcatctctttctctcttcatctttctcctcatctatctcccccgaaccccgggcctctcattcttttatactctcagtccccatccactcacagcaggccacgtcacctcaccaggcacgcagcttcagccaatcagggtggcagggacatgtctccaccaaatatggacttgtttaaaccgccagcatcatggtgcacctgtgcagctctcacaatggtcgtggcttattttcaggtgtaagaggaagtcaggtgcaagtcataagacttagctgcagtcccgggcgccatcttgggactgctgccacacccgctcctcacaaactaccccctcccaattatgtttatgctcactgactatttactagctcaacttaaagcaccccatttatggaaatctatttgtccaacaaaaatatggattaataaaatgtagtatttctacatagtggaatgtgattttaactatacaattgactaaatttatgtcttttgcgagaaaatagatccaaatgaagatctgatgtaatattgttaaccaaatgtaacccagtctctgtgacaaatgtgctccaggccacaaaccagcctgtgcatgcgtcttggtttttggcatagtcgctgggagctctatggagtcccagttagttgacactgatgttgttccatggggttgccatttctttcagctccttcagtccttcccataaaacttccataggagttctttacctcagtccaatggttggctctaagtatctgcatctgtctcagtcaactgctggaagagcttctcataagatagtcatactgtgcacctgtctgcaagcacaacatggcagtagtcataatgtcagggtttgttgtccacccatgagatgggtcccaagttgggctggtcactggatggcttttccttctatctttggtccatttttatccctgcatctgtatggctcaaccatagaaaaaaagagaaaaacagcatagaactggaagaaaaacagaaagaaagtggaatagaatagagaaccaagaaataaactgccataatgagagatatctagttttggatagccttgttaaaaatgtcaattagggaaaatatagcctcttcaataaatgatactccgaatattaaatatttgcatatagaaaaatgaaactagatcaatatctcttactgtacagaaaaataaagaccttgttataaaaatctgaaaaatctcaaattgctgggaaaaaaatcaaagcaaatgcaacaaaaataaactctgcaagcaagcattgttctctccaagcacacatgtttctgcgtggaattaataggttctgccctgcaaataaaactactgaatggtacagaatattcatgaatgtatctaacaggagaccaatatttagaatatataaataatttataatattaaatacagttttcctcaaagagttcatcaataaatgatctctcaaaataaactcattattcttaacaaatgaatttcagatagccaatggacacataaaattctcagtattcctatatgtgaagaaaatgaaaactgagtctacactatactggcatttcatttaacccatattataatgcctagcattaataaaaatacagcaaatgatgcttaataaagtaatacttctaaattgttggaagaattttaactggtagtgctaccattgaaataaatatgatggtttctcagaaaattagaactagaactattctatgttctatatgtactatcctgtgaatcttcccacaggaatctaagtcaccatactacagaaacatatgcccatttgtatttagtgtagtattgtccacaataattgaggaatttaattagtccaagtgaccatcaacaggaaagaaaatatattaaattgacacaatgaagttctatttagttataaaaaatgaaaaatgtcacttgcaggaatatggatacaattgatgattgcctgttacattaaatgtcctatattaatagaaatatctgtgtgttcacatatggacacataaatatgtataaatgcacatattttaatgtacaacataaggtgaagttttgcaagtggaagaagagtatttgaaagattcagggtttaggaggtggtagtgaagaataaatttcatcaaaatatataatataatttggcaaaaatattttttgaaactaatgttttagagaaagtgcactactaaaattacttcaaagcttacttctggagtactccacaaacatgctgcataaagaactacatagatccaaggaaacacaatcattaaatttgatataagctaaatattttaatatgttgttttaaattactggtcggtggtggtgcatgcctttaatcacagcacttgggaggcagaggcagttgtatttctgagttccaggccagcctggtctacagagtgagttccaggacagccaaaactacacagagaaaccctgtctcagaaaacaaaacaaaacaaacaaacaaacaaaaaacccaaaaaaccaaaagtcattcattaatcttttatgacgtttttgaagatatctaaagagacattgcattcttgcaaaactaatgggaggaaaaaaaaagaaaaatgaataaacaggcgaaaataactcagtataacaagtggtggagtggcttagaaagcacccaaagaccgattaactctgaggtatcagtcagttacaaatatgtgatccctaaaatgtatcagcctgaagtgagaaggtcatccagtcagagagagaatcttgaagatgaaggagatgagaataacacaaaaaaagttctgaggagaggattgcaaagtcatcaagtaaggatgtgtccacctgacatttttaccttcaaatcaagattactgaaataagaaaaacaatcattttatagccaaataaacactatgataggccaagaatgcaatgatcttatggcgattttctttgccaatggaggatttggaagtgattgcctaattgcaaggttttatcccgactttttaaaacagtatgtgtggtatcacaaaatatcaagtttgtttcctgaatagcacatctccaaaatgcaattctcatagctttattgttttagtttactctagaatttttctactattaaattcaagtaattaattctatacataagcaagcattcatctctgctgttcttcccaccagtgtttactgacttttctctcatatcatgtaataccttcttcaactcgttgtttctgagtgtcaaggtgaaagcaggggtaaggtgttttgcgatggtctagtttctccatacagagctcacaatctacagtcctatgaaacctgagtactattgctcctgcacattaataatgtagatattaacagattaatgtaggactgttgagtttgggactaaaacacagtggacaattgtttcagtgatacaatgtatcaggtagagagaaacatgtttaaatataaaaatggagaattttttggtaattgtattcactttcatgttcgcttactatgcagagcagcaaaatatagtttatattttagattgacacaaagaaaaaaaaaggaaggtctactttgtttcaagacccaaattcattgtggagacactaaaatatcttttaaccttacttggtatttttaaatgttgttagataacagagaaaggtcattgattggaatttagacagcatagttttaatgttgcttctggtatttatgaggtgtgtgataccatagaagtcatttactattaactccttcatccataaaatgcaaaggatggtttaaatctctgagcactttatcaatcaagtcagcatcttttaagagttagtgctttagaatataaggtgatgaataattattcacagttccctctttaaggccttacagcttacatttatgctccatttggttttcagctttattttaaaagcaaaatcaaacaagcaaaaaatagctctttctaatgtaatattaacctgacatgtagcttggtggagttatttttttctattcacaatgtagacatctgaacaagctttaaagtatgtacataagaacagaggttgatattttgggttatatttttcttaaaggcatgtaaatatactcaagttcattcaaaagcatatgcatgcttatagattattgatttgcaaagctgtatgtatgtatgactgatggttcacaaagtgtaatcttatgtttatttatatgcctgctatgtctggtatgagaacaggaattaaatgtaaatatgtgtgtgtatgtgtgtgtgtgtgtgtgtgtgtgtgtgtatgcatgaagcaaatatgaacagcaagtatgaacccacaccatgaaaattttagaagttgtatgagaagcacatttatttatttttgattcagaaccaatggtattataagcattctaaccagatttcttttaagtaatgagccatataattattgcaattatgtcattacctgggatgagaaattatataaactttgtacaaaatataagaaaacatcaaatatctccctaaaagaattctctcatcaattcctgatgatgttttgagtactagaggatttcaggatgaaatgcaaagccaaagaatcagctagaagtggagtacaaagttgctctcttcagacacccgaagagggcatcagattccattacagagggttatgagccaccatgtggccgctgggaattgaactcaggacctctagaacagtcagtgcacttaaccactgagccatctttaaagcccaaagagtttttttttttttcctctattcccacagtgttgacgttttataggcaggtgaagagctaatccctaactgtaacagcaaaatggagatacatgttcactgtcctccttgatccctttaactgccttgggataggacagctctacatacgctctcctttgccaatgctttattaccacttcctaaaacctgactctctcatactgtcccctcccacttccaaaaagcccttatgtcatacactagtatctgtgtgttttcacatatctatttgagcatatgtgaacacacacattgatatttctactaacacagtacatttaacttaatgggaaatcatcaatttcttattaatcaattgcatccattttttgcaagtggcatatcatatttcattctttatgactaatacagtagaatccttaataatcaataaaatgttacaacctaattttatatatattctacatattctggaattttatattttcaaaatttttattttattgtcaatctattagatttcaatttccatgctaatataccacactagaatatatgccttatgaaatctaaattttgattcatattactactgtgaatcacacacattataatttttactcctctatgatttaaatacattgtgcaaagattttttaaatgtaatttaatttcttgtgaaataaaagccattatttttttaaaaaatggatcttctatttggtaagatcttataacacttcatgatatacattcttttttcagtttttgaaatttccattttaaaaacaagtgttatgcgatctgatctaatttaaggtaagatatttaggatttctagaaaccaaaaattaaaaattaaaaaggcagagagtgactggggcgatgtttttatgaagaaaagccttgctccggtacaaaaagccagacttagctccagcatctacaatcccagtaccttgatagggtgataggaggtggagacataagaattttcatatgcatgaggctttcagaagcatggtatatccaaaaataaaaagacaaagagactgtttcaaaccaggtggaaaccagaatacacacctgaccttgtactgatgcccaagggattgtgtacatgcacacacacacacaccccacacacacacagtattcacaaaactagacaagagacagatacaagtatcaaagttataggtgctggaattaattttatttttaccaaattatcttaagtcccttgtatttgttggtttaaaaggagtatctcggagctcttgtctctagctgcatatgcatcaaaagatggcctagtcggccatcactgcaaagagaggcccattggacttgccaactttatatgccccagtacaggggaacgccagggccaaaaagggggagtgggtgggtaggggattgggggggttgacatggggggcctttgggatagcattgaaaatgtaaacgaggaaaacacctaataaaaaaaattaaaaaaaaaaagaaattgaaacttgtaataaaagaactgtgaaaatgaattttaaaaaaaaaggagtattctcagtaagaaaatgaaataattgtccttgacctgcctttgaatgactctcagtgagttttatgggatgcttgggcaggcatttattgtgctaagcaatacattaactaacgctcttcaaatattattttagtggcagcataaaaaaagtaagctggaagttttatttctcctgttctttcttctaaattgaagctatataaattgttcatcctgaagagtatttggacatctataaacacctgcatgcaggaagcctcaggcaatgctaaaaatagaaagaaagcctgagaatccttcactctgtcagcaacagagaatgttctggtgcagcattgaatttatgtagatgcttagtatatgtaacataaacagaaatcaatacataacgtcaattacacatccagatattgaagagtttagcgcaagacagtcacagcagttcctcttggtcatgtacttttaggcactcacaggatttttaaaatacagaaacagagataaataatgaatgcacatttatattcaaccacattagcatgtttcctttcccaaatctctgttgtctctgtcactctttgactctttctctcttccttctctctggtgttttcagagacaagttttgcgtcgtacttactaagtttaaatttttcctaaatcttctgattccaagtgcaaacacaagcacacagagacacacacagacacccacacctgcacaccaacacccacaaaccacacacaccaacacacaggatacaaactggacacacatcagcacacaaatgcacacacacacacacacacacacacacacacacacacatacacacacacaattgcacaaatgtacaaacttagttcataaaaatcactgaactgtgtttgagaaaaaatcatgtgaatttaattccctaaatctttagatttacacatccttctgtgtaatttgacgaagctttgagtgaaagacatttacagcaatatcctcgggatagtagtcttttcagattctggattcagaaacctgacagagccccatgctgagaaagaaaggctgcctggaacagagatcatcattatagtcacaatcatttccccaattgcaggcttttggtaaagtgttagtttccctgtatttaggtgtatagtgatgccattctcttccatactcattatttccattttgattttttatcatttctctctgtataaacatgtggcaagtcaacagttgttctgcactgtgcagaactctccggtttgatgggactcctaattgcctgggtttttttgttgttcaacaatgtaaaaggtgctgtattctgtcatcactttcatcacggagaatgtggctttataaataaataatcaagtgtagtaccttagaataccattgttccattgcttattgacagtgaggactaccacctgggagttctgtcttgcctttttccattgtgcaggtgttttattcctggacatccaagaaattctatactcttcaggttcaatagtttaaattagatctacctcatatcttctcatgtctaattatatattcaattttccagaaacttggagcagtatttcaatgtgcaaatccacatttctttctgagggacatttccctaagttatctgaggctctatctctgcactcaggttatcatgagtgccagttgtattaaagaagcctcattttatcctgtctgcctcagtacagctttggccttcactacttcttttctttgccttttccactgacatttgctgtgaatatttcaggtctcctgtctcttggtaatttgattttctgctgcatctcttttatgctttgtgatttatacattggttttctaatgctgaggtttagatttttcatttggttttctcccattttatttctgcctcttgtttcgccatctaatttttgacctctattttcatttaatctctttacatattaagcaactccattgtgtgaagcaacttgaaagctgtctttctattctgtggtgtgtcctttatttattcattgcattgtatccttcccttattcatacacacacacacacacacacacacacacacacacacacacacacacacacatatatatatatatatatatatatatatatatatatatatatatatatcacatatcttaaaatttaatcatctaagtagttctgtataagtattatgtttgctccagtatattaagggttacctggaaacttaacttccgaccttcgtcagatactttaaactccactttgaggcaggatgatccaggttttcagatgtgtaaataacaaatgtatataggacaatggcttcagatgaagctgcatgagacttttatagaccattcaaccagctggttggttctatttcctacttctatttttagagaggaacttgtaaaaaaaatatattccaatcaactctttatttctgtgctggatgattttgtcagctcaacacaaacatctgtacctccaaaacgggaacctagacttaagagttggctacataagactggactgtagtcatacctgtgagcacactgttgattgtgggtcgatgtgggaggacatagtccactgtggacattggcatccctaggtgggcatggtctctgtaaggatggtcgccaagcaagccaagggaagcacatcagttgacatatttcctctgcgatatgtgtttcagttatggcatcagagttcatgcctccaggtcatggctttggctctcctcagtgatgattcaaccagaaagctataccatgcctcttctcaagttactcttgccattgttttattatcacggaaaccacaatgacaaaacactagaacaactagaactcaagaatattttgtgcttccttgataaccatagcaccttttcaatgagaagaggcaaaatgtaggctatcggtaggtcttgcatgagctcatgtttaaaggttgctggtgaatagatgattatctgcaactcactatctgtcatgggtcagggaagtgggttcagtattgcaactgaatctatcaactcggttgcatgtactgaaaggtttcctcctatgataatgctaagtggggaaagttctgttataatttatctagctcttcaattggttcagtgtaaaataggcacacatagctctcacccaggatattttcctcaaatatctaaaacctttacatttttctactttcaaataccaaaaaggacagactgtattatatctgattaagaggaaataattggtgtttgtaagaggaataatttatgtttgtaaaattagtaacagtaatttgttctattttctaatttttggttatacagatatttccaatatatgtatatgctagaaatatatgtgtctgtatgtgtgtgtgcatatgtgtgcgcgtgtgtgtttctgtgtgtgcatgtgtgtttttcatttacttcacagtgcaagtaaaaattcagaagataaaaatgtttatcaattttatatgcactacgatatttatatgtgtgtatttatatgcacatttgcaagcataattgttggtgatatgcagtatctgcactagtgaattaatttccatacctttgttaacacaaaggggtggtttcgacatcactgtgcatatagaactagggttttggagcagagctcctcttattttcatcacaggcttgagcctaatggaatcacacttccaatttacttatagctctcacaattgaaaagagaaatgaaaagttcagtcaggacttagagaaaagcaaccctgattacagagaaagccagcaatggggaaaggcactgactgggattatttgtctggataaagaaaattgtgtgaaaagatctgaaatcattgcctggtatgtatgaaggacttcgaagtaaaggttgaggatcagatgttgttcattgccacatacagaagctgtgttgtatagaagaaagattttcttcatggattgtgtgcacaataacgagtgctaatcagaagtagaaatgaaattcaaaagatctgaactttcatttccctgtactgattaaaatactgactgtggcaacaacagcagttaagctttacaatgctgctgctagtattcagctgtcataattcatgttgatgttagaagaaaaacaattccttatttcatagatgctgtttcttaccaggcttatggttgttattcatctgtagccagaagatatatcctgtcatatatatatataaaccagtgtacaatagcaaattttaggaccatataataatatacattacatttattattaataatatgaacatatatatgctgtgggaatatactaaaagatcttgaataacaaaattagagaaaatacaaagtgaaaactgctttaaaagtattacaaaaactccaattaagattaattgcaataaaaaaaaacttacatttttatacccagcacatcatattcctaccatttaaatgtggaacttatttcaacttagatagtcttgggaaagtatagataggtatgtgaaagaaacaagtgaagaaatgcagggctcaacaactgctcctgaagcaggagactgatagagcagtgataatgaacaagattagcgagaaattttaaacagatttcaagtgtgcaatcacagaagataggcctagatggaggttatcatatggaagcttgttactaggtaaataaaagaagaaataatttttacatttaaaattaagttgcttgaacaaaagtttcttcgacagcaaaagtcagcatagggttaaattaaaacagatttggaaaatgagagcaatttctcattgttggattgggcagtcttttgggaacactaattctgtttaggtgtgttttcctctcctactctgcagtatggctaagcttacatttggtaccaggtggtttgcttcttagccattgtttttcacatgaagtattctttctgcactacagacacagttgggtggaggcattcagctattgagtggttagttttttcatatgtttacattccagaaagaactaccgcaatggttctaaaaacaaatgagtaaatcaagtacaaagtgcctcctctgaagacccactgggtttttacatttttaccctttcacattttatttattttgcacattcatagtttattatgtccttttaaaaattataatgcaatgatatcatttcccccaatatctttcctccttcaaacgttcctatttatccctctttgatctctttcaaattcatggtatgttcttacattaatagctacactttgccccttcttagaaaagggaacaacacccatggaaagagttgcagaggcaaagtttggagctgagacaaaaggatggaccatccagagactgacccaaccagggatccatcccataatcagcctccaaatgctgacaccactgcatacactagcaagattttgctgaaaggaccctccctgacatagctgtctcttgtgaggctatgccagtgcctggcaaacacagaagtggatgctcacagacagctattggatggaacacagggcccctaatggaggagctagagaaagtacccaaggagctgaggggacctgcaaccctataggtggaacaacattatgaactaaccagtaccccccagagctcgtgtctctagatgcatatgtagcagaagatggcctagttggccatcattgggcagagaggccccttggttttgcaaactttatatgtatgccccagtacaggggaacaccagggccaagaagtaggagtaggtgggtagggaagcagggggagggggagggtataggggactttcaggatagcgtttgaaatgtaaatgaagtaaatacctaataaaaattgaaaaaagctattatatgcatatgtgtatatatatctttccaatatctttcctccttcaaacgttcccatttatccctctttgatctctttcaaattaatatatatatatatatatatatatatatatatatatatatatatacatatatatatatatataattgttttcttaaatataacctccttagtctatataatgttacttttagctcattttttgaatgaagtaaagaccgaatgttgaaagtagtaataattgcctgccctagggaagggaaggaaaagcacaccaattggttatccaatgctaaatggtcattattcttagagagaaatagtggttactaaaagatcatgtagatttttttctaacaaaaactgtattttatgatgcatgttaggtattcactgaagtgatttgtaccgccttctgtttatttatgccacgagaattacagaaaggcattgttgaagaggccataatttgaaagcaagttaggttgtggggtggggtgggtgaatggacctggaagacattggagaatggagggaaaatataattgtattttaattatattttttaaagataaaatatttattaaaaagaagttatttgtcatttcaaagagctatgacaaatctttaaaatgtataaaacctcttaaactccaaataacactgaaaaaattaattttgtataataaaaaatgctttaaaataatgtttgttacagacctaaaaaatgagattatacaattttgttttatttaaaacatattaataaagagaaaacaataagttatataaatataaaaatgcttgaagccatgagtgaattcatggagcaaaagaagaaactaaatatacatttgggataatcatggtattgatgaaacccattccaatagattgggtgctgttgaggacataggtcctcaaataacaaaagcagctttattgtattaaggtaagtgactaaacaccacacagatattataaagggagtcaaatacatttagaggaaacatacccaaatgtaagtttgacctatgctgccctatctatgccaggaggcatctgaaggaatatgtcatgtagattgatctttattgaagataaaaatctcattcaagaattttatatttttcagcatcctgttcattgacagttgacttgaatcagcattttcttggctataatatttttcagaatctttaatgtactacatagacataaagaccctagaaaatcaaaaccttgttatttccagtcacaagtttcattttatccaaagaagtcaaatgtaatgaaaatccatatcttgttggaaactgtcattgtttcattcatatttgataggttgaaatatcatggtactcaggttttatttatttttttcctttttaagcaatggctacaagtaaatagttttaaatgctggagttattgctttcatagaagggaaaggcagaggaataaacaaaagaagatcgaaaaccagtcatatgctcagggctttgcactcaagacccttcatctggctgggagatagcacatataaaatgtgacttagctaacacttcttaataaatattgaacacagagctaaagtattaggtgaaggagaaaaagacaaaacctcacatacaactggaacgcaagttgcctcttggaaacaatcacccatggaaggagttacagagacaaagtttggagctgagacaaaacgatggaccatctagagactgccatatccaaggatccatcccataattagcctccaaacgatgacaccattgcatacactagcaagattttgctgaaaggacccagatatagctgtgtcttgtgagactaggccggggcctagcaaacacataagtagatgctcacagtcagctattggatggatcacagggcccccaatggaggagctagagaaagtatccaaggagctaaagagatctgcaaccctgcaggtgcaacaacattatgaactaaccagtagcctggagctcttgactctagctgcatatgtatcaaaagatggcctaattggccatcactggaaagagaggcccattggacacgcaaactttatatgccccagtacaggggaatgccagggccaaaaaatgggaatgggtggataggggagtggggggaaaggtatgggagacctttgggataacattctaaatgtaattgaggaaaatacgtaataataaaaaatattttaaaaaatataaaaaaaaagttttctaatctgaggagtccaccctaggcagtgatccatgactcagcagaagttaatccttacctgtagataagcaatgttcaccctttagttgattttccatctttaaaacaaataaacaacaacaacaacaacaaaaactgactataccattgtaaacgtcaatttcttccactaaataatttgattatcatgacagttaatattatatttaaagtttagactactatacttgagagtccaaaaagcaaaacaaaatgaaacaaaaaaattaaaatcctctaacatctaatcatgtaagcctctaatttgtacaagtcggaccccatctttccctttactttcaagacattggaaactattcctgacttgactaatcttgtaaaatttgctgttctacaaagatagtaataggtcattagactaacttctctttctgcttttgtaatcaaacttgtttactctcctaacaatagatgactaggacaactgtaaaacatacatgctgaaacttgagcctacctacaaatagacataatacaatttaattttgtgtggtttgcctttatgagacctatgctgatatgatagggagctacatcttgggagatgtcttaggtgcagtgctggtcacaccagtacctaaataaaaagaatcttattaaaatgtatatggacatgatgtatctctgagtgaccccaggctcataaaaattatgacaagtaggattagtttggagacacagataaaatcaacacattatctgtgtattacgttgtatctgtatatcaaatagcaagttacaagtttggtttgtgtcttcatgttttattgtaaagagacaccatgacctcagcaagtttcacaaaaaattgtttaattagaggattagtccattattgtcatgctagtaatcatggtagtgtacaggtagacatagtggtggagaatgacctgatagttcaacatctggattgcaggcagcaagaggtggggtggaggagggagtggagacgggagagggaagaggggaaagagagcatttgaaacatgaagccctgcccctctgacacagttccaccatcaaggtcacatctaacataacaaggccacacatcctaatgccactccttaagcattcaaatatttgagtctatgcaggccatatatgtactcttctttcaggtggttattctactataatacatatcctatgtttctatataaaatggctgtatcatatcattttccacctcatgttattctttgtttcactctccatattaaactcagattggtttttttatagtttgcatgacattgttcaagattctactagtctctaacttataccagtatacccatagtatagtaagaaaatgtgaactttattgagttcttaaaacaaaaaccaaatgtctatcctattatgaaaatgaaacactgtactaagtatgtggtgtaaagagactttattggtacttattttattataatatgcagatgacacacactcataagccctatggcaggaaatacagacctgggtccagtttggatacgcaatgcatttttttgaatgtttaaaatctcagtgtactttagacatatatttcagtttactaagtatctaatatagaaattaatgaaccagttataaaaagttatgtaaattacttatgaaaacaagtgtaatgtgtaatgctgaaagcataagctctatggaaaactcagaatgtcagccataattcatatgtatgtatatctatgtatgcctcatatgtagcagaggatggccttgttggacatcaataggaggacagacccttggtcctgtaaaggcttgattccccagtgtaggggaatgccagaattgagaagagagagtgggtgggtgggtgaacatccttatagaagcagaaggaaggggtatgggatagggggttttcagagtgggaaccaggaaagcagataacatttgaaatgtaaataaagaaaatagctaataaaaaaattcaagctgtttaaaaaaaaagaaaataacatacatttttaaatatcatgaagttacatatgtccatgcaaacacacacacacaatgtccacgtttatgtagatatttatatagattatggacaataaaatatatatgggctatgcattcttgttggctctgcgactgttttcctggaaaatgtgtgttgtttacctacatcacctgtctctattctcaactcttctccctacattgtaagtgaggataaaatcagaggcatttgtactgaatacacagagtaagattaaaacccactccattctggctccattactggcgttagggaaaactgcatccttttgtagctactctgcatcttctagatggctttcctcctttgttgcactatgatccttcctgttcctattcccagattttaggtcgtctttccattccatttcacgtcatttctttctttcttcatcttctcccactctgacacatagtctatgcatatagacactcacattattgatttgtttcactgcaggtgattactttaaaggtacactactgaatgtgtcctatattgcaaacctccaaagtattaatgcatttccaaaatctgatgagagcaagctgtttaggcagacttagggggtttcccagccctaggagaaacaggtcgaatggtttggggtgtgtagacagttgctataatttctaaaatagctctcagaacatacttccatcatctctgagaccctataaacatctctgagttactcttcccccagaatgttaggtggcaaaggaggcagttacagcaacgtggtaaagaatgggggcagagcagcagactgccaggctcttaatttacaagaagcgtaatttttgaagaaagttatgtaaatggcgtgtagtgtaacattttttttttgctttaaaataattataatacatcatgtctcagagaactatgatgaaactgctaaatataaagagagtggactaataaattctactttgtctttacccaagaaatactgcctgttgactagtaaataatcagtggatgcaaatctgtgtaaaactgaggacagagttgtaaagattccactcatatatatgtcctcagaggcactcagtaaatatttcagatgtcttttggtacattgtcagtgaacttggcaaaagaatcagaaaaaaaatcatcattatgctaataatattatcaatattaaatacataatttagccctgtatacagtgtttagaacagccctgagacatttcttttcatgactttggagcatgaatatttatgactctgtccagtcatctaaatcaattgccccagtgaaagattaaagaaattaaaaggagtttagtcctggaggttcaaatgtttagctacaaatcaagactttaagaaagactgagaaaaaaaaaagaggaaattatgatgtttatactgtctctgcctgttgccatagttcttggtgaaaaagaaagacaatgtgaatacttatggtggtgtccaggggaagcctggtagtcctggtttgtagaaggaaaatatatagttactcaaatgtacagaaactcactgcatactgaacatggtaaaaccacgatacaaacagactgacttggaaaaaggatgctaaagctgcatgttttctacataaagcaagctcatggctgatacctccctgaattttatgtttcttcttagactacatgaatagtcaagttatatttcagcttaactctccacatcgctgtggtaaatcatacccaacattttacctcctggttttgaggaactgagctagtgtgttttattgtagttttctttcaaaaaacaaactctcattatggaacaactgttattatggtaattaagaagttaaatgaaattagttgatgatataccatactcaggaaatagtcatatatagtataattatatgatacagtgtgtagttgctaaaacaatatgtatgtgttaataagatcattacaaggttcttttcactagagagcatctatagctaaagtgtaatgaaatgtattgttacagatctttctgatctcattatctgaattgtctgtttatgtaaacttactgtttgtctcctaagatacagtttcctaatcattatctacttttcagttcatagaacaaatgaatacaaaccttttggtcttcaaaaatattgtttgcatgtgtttttctcagagactttttattccttccatgtggtcaaacattgttaattgcattgtgtttgggggaaattcatgtttaggaagctaagagttggtaagtaacagaaatgacagagcactgttgtcacttcagtgagacctcagcacatgcaaccatgtgcccactcattccttgttttctgtctttgcagttccgccctggtttttaaatcacccttccaacctctatgcctatgagagcatggatattgagtttgaatgtgcagtttctgggaagcctgtgcccactgtgaattggatgaagaatggagatgtggtgatcccgagtgactattttcagatagtggtaattatgttcttttcgtattcgttttgcaatcctagtcattatttgcattcttccattaaatttttttcttctgtaaagtgaaagctggagaaatggcccaaggtctttggaggatccagagattgtatgtgggtcccaaacacgtctgtttctggtaaaagaattgttttaggaaagcaactaatttgcaaatttgaaatgttaggcagttaatatagcatgttttgtttttacaaaaaggagagaaagaaagaaggaaagaaggaaggaaggaaagaaggaaggatagttcaagcaatgaaataagaaaggaaggaaacgagaaagggagagagagggtggtgaagacaggggagaagaggagagaaacaaagcatttgagacaactcattctcattgtcatttcatgggttagaatttacaaactcggttgcagaatgcagggaactaggattcgcctgctgttcagcttttacagttagtgatggtcttccgagagacatgcttgttattatcatggttgccctacagcagacatcgacactactgcttccctcactgttttcccaggtggagcctgataaccctcatgagaggtgatgacagatgttgttactgtggtcttggctctacctgaggagctacacagtctgtattgttttgttactctgcttcccatgttggaaacaaaactgactgtgaaccatacttcttcccccccccctaaaattctagttcacattcagtatccttatgggagaccataggattactggcttctccattaggagaagaaacatttgctacttgaaaaagcactatgaaaactctttgttggatataggctcatcacaaaggttctgatttcaggcctatgtgcatataagaactataaaatccacttttcaactatgaaaagaactgtgtgattaaaaaaggtggccttaggagcttttgtatttgagacaaatgtgaccctgtcaaagaaatgccataacagagtcaagtcactcaggcagttggaactagagcatagccatccagagaggcctccatggtatccccctgtggcattatgtgtccttgttggtaaatgactcttcaacaatcaaacagctttcagtaatgtccatagtctcctagttgtatgcattttgtcacaccatacttctaaagaataaatctgtacaccacaccattatcatcgttgtctctgttttccattttcacttttactttcatttgtttaattggttgggtaagagtaggagagagcaccacttaacttttgaatgccacaccaatccattattttaaatgcaatgctctttccattgccactgaattaaaaaatgacctgccattgggcagcttgaaaagtggtgcatgtgcctaaaatatatgctacttgcatgaaaaggaaattgttgagtgcccttaaggacgcatgataaaatgcaacatttatttttttcccctacagtttgaataatctttctcacagcatgagtcattatagctgaactattcaaatgcttcttttctttaggtggaagaaaatgtatggtatatgccctattcacatcaaaatgtgcttaaaaatgttgcctgagtagttacagaaatctgagagccattgtgctttatatgtgcaatgctgagttcagacagtaacttagaggagaattgttaattagaagttagccagctttatctaagaattttacatcagttgaaaattgactacaagacactaaaaacaattaagaattccctgtgaggtaatatttatctcttaatgactttaggggaagtgatttagcatgtctcacttactgaactaattcttgcactaatattgaagataaactgagtttgtataattaaatactatctccagatcattttatcatccatccttgaaacagattgtggtttaaattatacacaaaaggagttaactttactgtgtttccacaatgaattgctgaaggtgaaatttttcctctatatacaaaaccaaaatggatatcaaaatctatcataggctcgacttctagcaccctaaagattatgcccaaaaaattgctattttaaaggatcctcagacactatattgggcaagtacttccagaaattatttaacctgagtagttttctctttagaatttgcaaggagggggagtttttcttcattcattcttgtttattcatctatttatctcctcaagtttacactccttcataatgtgaaggaatcagatttttttagatattgatctgcatttctttcattcttaataaagaaaagtttgaatttagcatttaaatatccaggaaaatgtctagttatatgagtatactttctttacagacttacacagaatcctgctcaaggattcagaaaatcaaatgaaagatgtgaaatattttccagaaagcatagaacatataggctctatagactcgtgatttttcttaactcttctgtgttctgagtttattttgttacgttgaggtctttaccccccttacaaaataatctcatctgcttttctttattttttttttccctagggaggaagcaacttacggatccttggggtggtcaagtcagatgaaggcttctatcaatgtgtggctgaaaatgaggctggcaatgcccaaagtagtgcccagctgattgtccccaagcctggtaagatgtgggaacaatagggcttagagttgcaattgtgtgtggcttatttgtaacatccacatagtttctgtgtggctcaaggtaaggatgaaattatttaaataatcaaagtatacgtgtgtgtgtgtgtttatgatatatcccttctaggaaattttatattaggcctgcctgtcctattctgctacctgtcctgtatatcaaatgaaatcagcaccttaggaacattcttgcacgtggattcagaaagtcaccaataaaatacgattgtctgtctattatgtgactgacttctgttccgatatcccatgtgaacataaaaaggctttatgcgaaagtttagatttgtgtgtatatatacacaggtatatgtaaggctaatatatgaacttttaaaacattcttacatccgtgtaagtggacagaactgagcatagatgctcagggacttctctggcaacttctcacagagctggaggattggttgaagttctgaaagatgtcttttttgtttgtttgtttgtttgtttgttttcattgaatttttctttcttcggatgatccagtaatagagatgccaagaaatccctttgaggggaggagtccctctgtctctgtctctgtctctgcctctgtctttgtctgtctgtctgtctgtctgtctgtctgtctctctctctctctctctctctctcgtgtgtgtgtgtgtgtgtgtgtgtgtgtgtgtgtgtgtgtgtgtgtctgatgaggaggaggaatgatgccaagcgtgagaaagaaagaggggttctagatggaaacgttcttgtgctgttcacaatacagggatgaatgcaatgagctaaagctgggaagagactcatttgtacacttgaatgaaatcaaggctaaagctttcttgctaaattctgcccaatgagtcttttcctccaacagatagaaagattcacaatcagtggtgaagttaagccaggagctaaggcagaggatatttagaaacagagtgcctaaacagaggatctctgaaaaacataaagaagtgcatttgaaataaatgcacgcattgtttccatgatggtggaatttgaacaagatattttgagcaaaacagactttgttctttcactccagatcataattacctctctgaccctaaagaacctctatgttgagataagaaatagactcaagggcctaaaagcacaagtgaccctaagaataaagcattttgagtatagttatattattattattattatttattttaacatagacacttagccatctggggataaacagtaaatttactattactttagtatttttggctaaagttagagcatgagtgcttgcatgaatgtatctgtgcttacttgctatatacattcatattttatgggattgatttgtttgatctatttttttcaaatacccattaaaatctgttaaacataccttaaattgtggctgtactggtggccaagtggataagatctctggctgctcttccagagaacccaggttttattcccagtaccaacatggtagctcaaaactgtgtaactcatgaattcagatgaaatggtatgaaatgaagagggaaatcccaaaacatgaaagaatatcactatgaatctcttctattccccacatacgtgatgcattgcttttttcctgcctcctgaatctggtcctcaaataatggcactctaattcttcagagatgtagtgtgggctgtgtgcacagatggtggggaggccaactataaatatgaattaagcagtgaggttgaccatggtgtgaataacataaccctctctatttaaatttaaacaataaatggtcaacacacattttgagccacattgtgaccctgcgtagcacagctgttcagcttttgagtactcatagacctgtggctcagagttacccttggcaaccatagcagtttgcttcttcctcaaatgaagacagtaacctgtttatcccagattccatttccataagcctcaagaagtttcttcattctcttatctatagttatctgatgcttgtcttttctttttccattggggaataaaaggggattgcagtaataattcaattaaagatatgttgttttttatagaaaaacaaatttggcgaaaatgattaaaatgtatttattgtaaaatatgaaatatatgtgcgattttcactagatcaagatcccgtgggtagcattttaaaaaatcattatagcattttgaggctccgttaataaaggtacttgggtaacactggtacatatgcatggggcacactgcaggatttagaccaatcatatgtattcctatggacaaaggatgaaccttggctatttaagagtttggtgaacaccaggaatacatagctacatcatgtaaacagtggcctatacaaattaaatacaactctttaagtgcattaataatctctcctcagagctgatgacagagatatatatcttttgttactgtttgtttcaattaattttgagagtggggtggggttgatgtaaagggtattgataagaagtctttctccaagtaaaatcgaaaacagaaccaataacactatttagcaaataacccggacttggatctgctcagtatcataaaaataaaataattcatcttttagatttttcagtagccagatctgcatatatgtaaacattttctaggttcttctttgtgttgctgatcatggtgaaatagtttttcaactgagccttgagtccacatctactagactggactgagatgaatattaaattaagaactccataaagagatattttttggagatggtaatagttattttggagctagaaaaggggggaaaagggcagaagagtgacaaatgataaatgcattctttttttctatttatttgttatgactctagcttcttctggggtatataaattctcttcacagtacacccagtagatcactggaagtagctttctagtcaaggactggggattgtgtgactaataatatacttacaacagaagattatgtaatctgatatgtatttaatggaaatatatatgaaaagaataaaattatcatgggaagaaaagatatgctccttatattctagtgcaaaaatgccgtaggaggaaactgtatgatcacaaacagaatttagttttaaatttctgaatgtattgaacaaacaaactagaaaaaaaatagtgtgggagtcacatgctaataatgcatgttttctaatgcatgatttattttttctctttccagtgtaagttccaagatagagtttcactgcagtataggaaataaattggttcggcattaagaaaaatgagagcttttaacaattacatctcttcccctggaaaaggttacctattacaaatgatattgcattttcaatattttatcaaggtagtatatcatatagtctggaattaccaaaaatattttgctggtcatgaacaccaacacataaaatcataaacccgtggtattttcttttgtaaattgttatgaatcaaggtgaggaacaatttatggatccaaacagacaggcgccatgtctatgtgaatgctgatgtaactgcatgccaaccatgagccatggtggtgtacatttctcaaggttgaattcaactcataaagtcacaggcatttatagagcatcaaaatcgtgttcaattagttacaacactccgggaactgttagaatgcaattttttcagtttaaggacacctatatagctgtatcagagagcctgcaactaaagctaaaatacacatactccatcacagtagctgctggtggcaaattaagttgaatctctctcttaacccgagaaacgactgcagtgtcaatgcttccttgtagttagtagatgatcaaactcttccaggaactcagggacatgagaggattctacacagtaacacgaaggctagaagatcaactaccatgcatgtcaccagatagttgtctcatgccaaatcatctgctagttaaaatggcaatatgcttctcctgagttctttcattgagttcaaatgactaaaagtccaacgtagcattatgaaataagttcctatcgtagtgatactacagagctcagcattcctgtagaattatactttgtaaatagttaaaattaattctaagctaagaaaatacagaaccaatttttcgaaagagctactaactgaaaatattagcttcgtcatatatggccataaattcaaataactaaaatgctatgttttgcttgccatgctaaaaatgaaaataagattaaatttgggttcaccacccatcctatttaagtctccagtttccattagaagtgtggacactcaagttaaccattgtccaacatggtatatggatttggttcaatttggtcatttaccctgaacaagtcatttgaaaatgggagatgtgtgcatagtcatctttatgttcttatttggcttctttacacccattggaaacatactgagaagttctatacatcctaggtttattgccaaagctttccaaggctccagtttctcagttgtaaattgcgaaagggaattgacccaaagaattaatgtagggactggggagatggctcagttggtacaccatttcccccagaatcatgaacactgtagtctggatgctcagaagccacacaaaaatgaacatacaaacaaacaaacaaatacatagtaatggacatttgttatcccagagatggtgtcaggacaatggtagaaacaagctgatcgctgaccctactgctagcctggtctatggggtgaagttcaggtcagtaagaaatccagtcttaaacaaaagaggaagggacatgctaattacactcagattgtcctctgctatgtcctaatcacatatacacagatatatgtacccagacacaagcactctcttgcagaccctagtactctcaaaaaggtttagacaataaatgtgttttaaaggaatttggaggctataaattgatacacaaatgtcgactgtggaatatattttttcgtttattatttttcgtatattattttttcgtttattgcccaaaataattattggggtaaataaagtaaaagctttcgtttattgcccaaaaaacttattggggtaaataaagtaaaagctttatttcgttatcgtcttctaccttccaaggacataattaatgaacaaatgttttaatacttaggctcacttaaactgaatatttttctgttcagttagcaatgttatgtcaaagaaaaataaaatgattgctagtagaaagatttccaggttagtttgccatataattttaataagtctgccatccaattcaacataggcagagacttctcaacaaataaaggcttgtcattcaccttgtccttcatcctgcatgtgcttaaaacaaggagccagtcctgtgctaatcaagtggatatgcctgtatggtaggctttgacattagaaatgaattctgaaatgatggcagtgcattgagatcagcaataactgtaaagcatacaacaagggaaatgtgagagactcataaatattgatcacatcatattctggtggtaaacacaccaaacaatgctataatctgcgggttcttaaaatgataaatattgggagagtaggagaaaatgttgattcttccatagaatccaaatgtttttgtgtattttatattcttacctcttacttacaaaataatcactcattttaggtagctacatctacagataacacacacaaaacaaagatatcttaaataataattaatatgtataattacacatataatttgatagccacatttccagctatatcgttatttattttaaattatttcttttatgtttttaagattgtaatagaatgacatcatttattcctttgctctctccaaaacttctcataaaactttttatctccttttcaaatcatagtttctttttcacgtcattaattgtgggcacatatctatctatctatctatctatctatctatctatctatctatctatctatctatctatctatctatctatctatcatgtctgtctatctatctatctatctatctatctatctatctatctatctatctatctatctatctattcctgaatacatatgtagagcttgctcagtctatatagtgttacttgtatgtatgttttcagtgctgatcatttgatactagataatcatataatgtactctctcctagagaagactatttcttctgctctcagcattccttagttatctgtagttcttcatctacattaacatgtctattgtattcttcattaaactcatgtttagacagccatgatggtgagagtgtatgcttatggcttctgacattcctaggaaatataaactcatggcaatctctgatcctctgtacctcatagtctttcttctccctcttccatgatgtttcccaagccaattatgtgcagcagttgttttgtaaatgtgtccttgggactcatcatctatttattttggttggatgtggttttaggtaatggtctccttctgttgcaattaggagtgtccttgattcagggtgaaggatacacttatctgtgcatttatggataactattttaagtgtatttagggattatgctggataacaaagtagtggttgtaggctcacctcaaagatccatgactttactaaacctgagtagttggcttggactccagtacctcacatgatttctctctagttgggtagattttatgttcaacggagagctgtctgttccaatcaaattatgtatgctactatttaacacttagggtacttgtgccatgatggctattgttgggattcatacatgtaatagacatgtaagacttttggttgctttcctccattgaagcatgcagagtaccttatggtaccatgaaaccaacaattcaaaagagtgtttctcataccttatctaggaattttttcttagactttggctcctaaggggagcacagtctgcacagaggagaaaaatctatcaaaaattgttacgtacataagtgtgtatgaataaacagagaattatgtgtattgtgaatttttgttagcagtgaataatatgaattttatgactgctacactaaggtactggatagagtattacctggatcaaaactaaggattaagatgagctacaatccttaaaaactaactttaattcatctcaagtttgaactgttcttgaagaaccttcaaaccaactggcatttctacatatgtaaccaaaagcacaatgaaaacactgaattggatcactccattgaaacaaaggctgattaggtatcaaaatgcaaggctaaggctctgctcaaacttctcaggagacgctatatcaggcttctgtcagcaaacactcttggcatcaactgtagtgtctgggttggtggctgcatatggaatggatccccaggtgagggagtttctggatgatccttccttcagtctctgctccactctcctttaggcataagcaattctgggtaaatgtttttgagatggatgggtggccctatcccttaaccaggggcccgtgcctaatagaagcagatgcttgcagccaaccatcgaaatgagaacagggaccccaatagaggagttaagggaaggactgaaggagctgaagggattttcaaccccataggaagaacaacaacatcaactaaccagaaccccacccccaccccagagatcccagggaccaaaccaccaaccacagaatacacatggagggacccatggctcccactgcatatgtagcagaggatggctttatctggtatcaatgggaggggaggctcttggttctgtgaaggttgaatgcacctgtgtgggggaatgctagggtggagaggcaggattggggtgtgggttgggggaacacactcatagaaacatagcagagggtgggatagggaggttttggagaggaaaccggaaagaggataacatttaaaatgtagataaataaaataaccaataaataatttaaaacacaaaacaaacaaacaaaacaccaaaatgtaaggctatttctcattgtagttgggataccagagagacacaaaatgttgaaaaataaagagagttgtttttgttgttgtgtttgtttgtttgtttgtttgctttttctggcagtccagatgatgggacctttgaactgatgcactctttctggattgagcgggagggaacccttgcccttcagagaaaagggaattaaacagaaacctattttaggagatttactgggaaatgctgaatttaggcttctatttaccaaatgacaggctttctctttgctggatcagagtccttctacgtatcataatagtaccagcgctaccattttgtgcggcacattttagacttaacattgatatctatatattgtctggttgaaacatttagtctttttcttcacagtttatagatacccaggagtcatttcatcattaaattgatgactagaaaggaactctgcagttggtggccagagtatccttcatgcttacccctatttccttacccaagggacttaagttattccatgtagggttgcattttggcttgcctgacatgaccaaacacctttaaagacttattattgtcctaggagactgagcgtttctaaatctgcagcgtccatactaagttttaggaaccaaaaatagacacctgaagtgggtcaacagtaatgatgttgactaggcccatgactacgtcagtctcttatgtctacttattatagctgctgacttcatgacaccagatacgggtcatcgagttagagaatttactacactccagtggtagtcacttgatctttctaagatattgtttctaattggcttcctcaagtgttctacttttatacattgagtgtgtgttcaacctgatggatttctttcagtacatgatcacttgattgaaccttttatgtgaaggatgcaatttagttgacctgaacttcaaaaatagttccatcgggtatcgaattcctgaagctcatcgacagacctcttcccccaaatttttgtgttcctgatctttatatcactcctcaatctttaacaaattagctaaaccacagtgtctgcatgtatatgtgctgcctcctttgtgtgtatatgaatatgcctgggtgccttgccctctgtttgtgtgtgtgtctattcctctgtgtgtgcatgtatgtttctgtatatctttatctatatttgtgtgcatgtatgtctatttccttgtgtgtgtgtatgtatgggtatgtatgagaaagacatagaaaaagagacagagacagagagagggatggagacagagagagagagagagagagtgtgtgtgagagagagagggagagatattcttgttgaggcttgccatgatctctacactaattgtttttttttcctacattataaatgctatagaatccacaaggtaatgtggccaaatgtcagggagtctaacgacatagtccagagggttcaaaatacctgtttcctcacaagaatgaaactgttaaattaccaggtaaattactgcaaaaggcatgtgcggcctaaaaatctcaaattctgttagtgtatatagaagagtaatatataaaattcatcctcacttgtagaacatatgtgatgatgtttctccaaacattttagcactaaactcttccctggtataattggccatgccatctttactgattttatctcctactctctaggcatacgtgtttcaccagagcatcccaaggagttgtcatttcttgctcagttgatctcactaaaatgatgttatgagtataatggccaagtaaagtagattgtgtactaagtggattgaccaggtccctttggacgatgtcaagtctgaacaggagagttagcagaaccctggggcatgactgtaaatgaatagtacttttccatcctagtaaatgagaatgtttgattatctttcctggtgaggctgaaaaagcacatcactgtggttaaaaatgtttcactggaggttatggtaatctgctgtagatgaagatatggcttctagcacagcaaacataatatgagccacatttagctaagtttgtggttattcactgctctaggctcttactagcttgtgatgacaggattgctgaattacattagaatatgatagaaaataccattttttagaatgttctgagagccactattctttgttattttcccagcatgtgagacaatagggtaataagtacaatgaaaattgcaatattgagatataaatacatagcagaagagatgtttcatatgtaaattttagaatacttttagtagaatataccttttataaaatagaccttaacttacaagtcaaatggaaatggaaatcaacattaatattttaaccaagaaattatatagaatttttaaaattaaagtatgtaattggaaatatcagacaagcagcaacgaaaactccaacatgcaaggcctttggctcccaaactactcggattattgtctactccttcaatcacttaaaatgccttaggaggtaagcttttggctttttatttgaatattttaatctgaagaataattttaaaacgtgcggtattttagaatataggaaaacatttcgacagttgtaatctgttctacctaggtaagagaccaacacaaaggaaacagaaatcacaaaccaaaataacattttgaagaacgagcttatatcaaagacttgttgctacaactgtaaaacattctctttaccatcaagatagtatggcctagaatatttaactcttttcatttcatagatggaaagaaggcagatatcatctataataccaaatgactgtagtggtgtaaccaggtttcacagtgatagaaacctgtcttgagtttgccaagtgctaggcactatattaaaccccagcttcttagtaacatagaacctaattcattccctacaatacaatattggagttaaagtcaacctttgtgggtgaataaagtctttcactgagaggtgaactgaatgcccaaggccatataactaactttggaggttatctgactttgagttttataaactagtccatctatgagtctgatcagaccaatgggtaaagtttaaaagttgtcagaacagatctggaatgtgtaatgaatggttgcagccttaaaaaagttgagacccactctacaggagtagacacaggatggtgagtcaactcagaggtgaaccatggttcccagcactggcctttggttgagtcgaacatggtttattgttactgtctcatatggagagatttagatctgctttcatgtctctaatgaaagagtgctttcctgcaagtaccttgccatccatgaatggttggtttaacagttaatgaacttgaggcaaacatattaattaatgattttaattaatgtgcagggaacctctagtgtttgttaattgctcaatagttttcaaacacttagggaaggtatatgcaaggagctaaatgcagattagaaatggcaggttctttttaaggaaagtttaattatttcaactaattatccttaaagtgtaacagagcccatgttgattgtgttccattttttttatcctaaccatatcttagaaagatagtaacaccatttatcacagaaaatgaaaagcctcctactgtattaaaatacttttttacttacagttttactgtgttttaagtgagtagctggcagtaacaaaattctctttttaaaaaagaaagtgccaaatcaccagcatacaattctctcaataagaaggaggaccaacgtatgggtgcttccgtccctcttaggaggagaacaaactactcacaggagtaaatacggagataaagtgtagagcagagactaaaggaaatgtcacccagagactgtcccatctggggattcatcccatatacagtttccaaccccagatactgttgtgaataccaagaagtacgtgctgaaaggcgcctgatatggctgtctcctgagagtccctaccagagccttacaaatacagaggcagatgttagcagccaaccattggactgaacacggggtcccttgccatggaccaggcctaatcggcccccatcaacccgtgggaatcagaggttcggacagatgggcatagagtcggcgggattgacagacagactcggcacaagggagtgtggttctgaatgtaaagtcaaatcgagcatcaaactttttatgcagaagaaaagagggaagttgggtgacacactggcaaggtacaaaaggttactggattcttatacaaaacaaaggaatgcaaacatggaagaactggcaggaaccaactgggataaatttcaatgttaacaactggaataaaaaatagctccacctaaggtccaattaatcttagaagccaggggcaagggcttcatgcccttgccatagttcctactctagtctattgtatagtccaccttccccctaggccattgtgaatactagtttgtgtatgggtgtaactcagctatctatagttctaagtatctactctggttcctctttaggtcacaaacttccttcttcctagataatggtatatttctgtgtagggcagtgacttagctatccatgcccaaggtcggatcaaggactgcctagaatctaacttagctatatgtcaaaatatcaatccttaggagcacttgtaataaaggaatattaagggaaagcacacagatccatttaccaactaaagcaaggacattggagcattctttatataggatgcaacggttccaggagactaagtttccatgaacttttcaccttgggacagcgcccaggttttcagggcctgccatgcttgtcactactggagtggatgtagcagtctctaatagaggagttagagaagggactgaaggagttgaaggactttggaaccccataggaaaaataacaatatcaaccaaccagacccagcagaactcccaggtactaagctatcagcaaaggagtatgcatggctccagctgcatatgtaacagaggatggccttgtcatcaatggaaggaaaggtccttggtcttttgaagagtccataaatgccccagtataggggaattgaggatggggatgtgggagcgggtgggtgggtggatggaggaacaccctcatagaagcaggtgagagaggatgtggtagggtgttttggggagagagggaaaccaggaaaggggataacacttgaaatgtaaataaagaaaatatccaatacaaaacaagaaagaaaatggacaactgcttttcttctaaatatcatagattggcattttgaaccttttattttttttaatttttgttttgttttgttttgttttttcgagacagggtttctctgtgtagtcctggctgtcctggaactctctctgtagaccagactggtcttgaactcagaaattctcctgcctctgcctcccaagtgctaggattaaaggcgtgtgttaccacgcccggtggtattttgaactttttatgctgtcccataaaagcaatcatagtaattaactaataagcctaagtggctagtacttccaattctgctcaaataaaatttgccacattttattgagcaatatttatcatgacttcatagatgtccacacctttcactgaaaatattgtcaaatatcttcccatttataggatggtcaaagttacacatgttctaaagagtattagaaggttcccttgaaacttacaatgacccatgttcaaataaaacatatttcattataaatgaagtcagatagaaattttgtcctccatgaatagtaagtacttcaagactagttccctgttaaataatgatgcacattctaatcatatgcaatgttctttttattttaaataaatatcagcaggctttgtgcatgaaaagctggccaagtaattcagaccatattgaacagggagcaatgaatttttatgtgatttttctcctagaaaaatgggccttatttgcaagaacaaagagataaatactgctactatgtatctcagattatatttctctcctgtcttctttacttcataaatggaaagaggcctcgataaccattggttgcccagacataagcctctggctctcctgaactctatgtccagtttctgacacagacgcttgctcttgggctccacttgagacttctcacgatttgacataagcctatgaacccaattcggatcagattgcatagggttttttaaacatgtttgtctagctaggaacagatgtctctttgggaattcacacagagagagtggtaaataaatttttgcttttctctatcagaggcaacaaaaccaatgcaactgcatactaagtgaccagattctttgcatgtaaaacattattctagaggaaattgcctttggctttctctagtgtgataagcacttttgttttaaaataaaacattaagagtacaaggagtacgcttatatcacaatggaggtagcacccaaacggtcatgagcagctttttctatgagagggagggatagaaattggaggaattgatatctaagctgtcaagatggcacggaattgtttgtagaaggaactttatataggcaggaaaggggcagagcagaactggaagtgcatgtttagggaatgatatgatggaaggctggggagattgggggacctggaccctaaatggcttttggaagatacatagaaaattagagttttatccacgttacataggatcttaatgggttgtatgtgaatgataggtgtggtttctaggtatttcttttaaagctcactttatttttacttttaaaattatttgttttattttttgagatgtcgaaatattatagtttcccccattccctttccttcttccaaaccctcccatatatacacttgctttcttttaaaattatgggctctcatatttataaattattgttttatatatatatgtatatatacacacatatatatacatatacatacacacatatatatatttgtgtaatatatacacatatatgtatatatatgcacacatatatgtatatgtgatatatatatatattttgtgatatatatatatatatatatatattgcacaaatatacacaaatataccctgctcaatttatatagtgttacctatgtttttttttcactattaagtatttggtattgaattgccaattggtatgtatactcttccttgggagtaacaatatttcttaaagattaatttattgttatatctaagtacattgtagctgtcttcagacacaccagaagagggcatcagatctcattacagatggttgtgagctaccatgtggttgctgggatttgaactcaagacctttggaagatcagtcagttctcttaattgctgagccatctcaccagccccgggagtgacaatatttcctgttctcagaaaatgttagttacctagagttttttataagagttctcctgaactttccccaaacctagtccacttcagggtgcctgtaggtgctctctatgaaattggtaatttctattactatacattcctatacatattaggaatctctaaagattatagattcttgagtagtagtaggttggtattaaaggcactagataggaagtgaggaacaccaagaataccttcagtccactactgggaattctctgttggctgccttttacatttccagcatcttcagaagctcagacagtggcaggatttcagtgattcatgaaaatcccctcctaggtgactgataaactcaggttcaacttatgaaatagcagagataattcagtagaggtaaatatttaaagggtggtataagctataatagaaaatttggcaatggaaaaaattaagaggctggagaaataacgcgtttctgtgtctatctcatagggtggaaaagaaaaaaacgagtatagactattttgccatatccacaataggaatgggtacggactggactgagtgacaactctgcttctgtagagaaagagggactcaaaaggactgcataatggaagccatgcttagaagttagcatttgaattgaaaagaagcttttcacgcagcccgggaaggctgtatcttattggctttgctggtggtaatgaaaagcttaagggagattgtgacagggttgtattatgcatctcgttccttgatagtatataagtgggtcattctcctactgatgaaatgattcttttctgctggacacattttactcccctttgaggaatggcctcattgtactgccatcatggaatagcaagttaaaggattgcacattaacataaaatagctgtgagtgctatcagtggtgggctggaacatattgatttgattagctttaaacgtctgaaggcaagaatggtcagatctctttcttcttcctctgcctccccttctgtctggagtaggtactgagaaataaaccagaatcagaagtattaactttggcaacctagaaataaaaattcatttaacttaccttgactatccttatctagtgttaaacatagactaaatagttttgtatggatttatgtaatgggttcacaaattgattttacagtatgcttgctttaagaaaaaaaaaatagctgagtactatatcttgaatgacatttctctctttgtggatattgatactgtaaacaagttttctttaaaatgtgaatggcaggatagagggctgtgataaagtgcctactatgtagcataaaggactattttaaaatcccagaacctatgtaaatgctcatgcatctgcaagctccgtgctgagtatcagagatgggcacatctccggggctcactcaccagagtccagtaagagaccttctctcaaaaataggggacagagcattagaggaattcaattgtgccctatccacatgtatgtactgacatacactacatgcacagccatcaacaaaaagaaagctaactacggattattttaataccataaagcctgtttatagtgtgcgattcaaatcaatgattcaaaagcttcaactacttgtggaggagaccattttacactgggtggcactgtcaatcaaagtcttatattaatgatatggataaacagacatctacaagcgtctttattctgacaacccccttttctctcagccttattaagaaacacttgagcatattcattgttttgcctgaattatagatagttaatttttgaaagaggattccttacaactgtaaaggggaatatcaaatatctgtccatccacactgcctctttctctcgtggccgagacacatctacatgagtgtaattggcagtgggatacatgtgacagtgtataagctgatcactgtaggaatggctagcaagatttgtaaatggtaacatcttctggaatttatttcaacagtctcttcaaatttatcttattccttgtgatatgtgaagccttggacagatgcggtgttaggacagttgatatacagggtttagtttcctgaaatgtgtaccttttcacagtcactccagtctctaaagcaccatagacagaagagtcccaatcctgaggtaatttacaatctcagaataatacttcatataaaatctgcccttctcaaaggatgatacattggtcccatgtagctcacgtgtgacttttatttcagtcagaagttgagtaggggctgtgaagtgtattatctaaattatcccatctttatcaatatatgcaatacatataaatgctgcatgagttgtatgagtctttagcatcatctgacttttaatatagaaaactgcaaatctaattagcagatctgtccacatatgaaatatattaacatgctaataggaagagtgaattggaaattttgtttgtgtcatgtgatctaaatttctgtgatgttttgttgaatcaggctcatatgatgttttgctgaagctagacctgtgagaggacacttgagtttggagagggtcttctggactcaaatttgtggcactaatttgagggttatggaatctttttggaattggattctgattaacagaatgaagttactaatgtcctgtgaaggtcacacctgctctggtttaggcttgctttctctgtttctggtgcctgactgacactatctactgtaagctccaataggcattcagagtgtgggaaattagcacttctaaaagataaaaattaaataaatgtaaattctttgtgcaggcaagaaaagtagatagacagagggttttgtttttttctgtcaaaaagagagttttaattgcttactcattggtgacatgcaacagtgaaattcattcagtgcttcacctgtatgcttttttgtaagactacaaaatcatgccacacacagggcctgaaacagccctgcacaggtctgcctcaggtcctttgcatatataggatagctttcagccgagtatttttatggcactcatgagtacgtgagcaagtacgtctctcatgctgtgccttctcttccagacttttccttcttttggttaccttgtccaactcctatctaaatgtttgatttttctagaaccctaatcataacaccctctagaaaaaataatgtataccaaataaaataaaataaaatgaaataaaatgaaatgaaatgaaactattttatttctcaaagtgcaaagtgagcaaacaaacaaataaacaaaaacaaataatgctgatatttcactaacacttacaggctaatcaggcttctaactcaccaaatctttttgtttgtttttgttttgttttgttttgttttgttttgttttgttttgttttgttttgttttgttttttgagacagggtttctctgtgtagccttgactgtcctggaactcactctgtagaccaggctggcctcgacgcaggaaatccacctgcctctgcctcccaagtgctgggattaaaggcgtgcgccaccactgccagctctaactcaccaaagtcctgtaataatagatttctgagttgggaggatgctgcctcattgagagtgaaaaaaccttacttaagcagcttctctgagagcagtctttggcagtgatggtttctatttgattatatagacatccccttttaatagtgtagggagatgaagctacctggtcatgtgagaagaggtgggtatcccacagcctccactagcatacaactgtcctgctactggcttttagacacaggccctagaaagggacttgtttaaaggcatgttccatcgtgctcatcctttaaaacacagtctgtgccatagtgggcttcataattacgagtctaccatgatggtttaagcaagacaaagtaagtcctttgctttgttgactgtttcagcaacaccctttatggaaatcattggtagctagatcatttctagacactgacatcatcatcacctctagcaattacttcccattttcttgtgtttgcttttataaccaacagatttaagactcgtgtatcttttactttaaatataaaattattacccttcaatgaataatgatgtgtatacttgctaacttttaaagctgaataatatgcataggttttggtagctaactctgcaagcgtcaattgtttatgctcaatgaggccagataatccttatgagtgtatgaacaaataatccactatctcattacttttataaagcaaggcaatattggggttactatatttcagaataattttttccccttaccaatctctgttcttctcctacctcttctcattaaaggagaaaaacaaaactcaaaaaagccagaacaagacaaaagacccttgccctctgatcagaaaacagaaaggacatagtcctgctgcctcttacagtgacaataagtgaggccttctctacaaatagactttgtataactttcctgtcccacggtgttataaatatattttataaacattttatatgaataaaaggacaattcagcctgtttttttcattatatatactgaattagagaaaaacttagaatatctttttcattaatagaacctctgggtccaatgagtgagtcaaacatattatataattatagtttatacatttaatttgaatgttaaatttctcaattttgtgacataatttaacaaatattcgctgaagcatagcacagtgaattaatgtttcatttcccaacttttacactatatgataaatcttcagatgtgttaagccattttcatgttatagtcatatttgttaaagttgtcccaattaattttattattatgatcattcttttcactaacttaccttgttgtcacaataaaattaaagatttcatatcagtttcctgtctgggtagcatctaacattcatgctgttggactctctttcccctttcctgtcatccaaaccatttaaaatttctgacagaaatgcacatgtaccaaagatgctgagaaacatttttattatgaaaataatcaccattcttttacttgtgattttagcctggatttttagagacctattcataaaaaaatgaagatgagagaaaaaaaatatatttgaggaagtcatcaactgtatataagtagagctctaaataccatcacataacggtattgcattcttttacactctaatagttagaagaagtattggagatactggagaatggctcaaaactttgaactatgcaggcataattgagatagatgtgccatgaggtatcactagagggaaggtatcttgtcccccctgatgttaatttgaacgagtgatgaaccacacatctactaatcaaaagagaccagatgtatactatttccccatgtactttatatgattgttgtccctggtaaacaaacaacagagggctgattgagggttttctcagctcaatacacttgactctacgacaggttttgaactctgacctcagaaaagcatatgggatgttaacgggctagatcaaccaaatgacatccctctgatctcatgagtataccttctggacttgaattctgacctcctataattattgacacatatttaatttatcttttcattccttccaaagcctagcacagctgctgtggcacacataaatacatcactgttggccacatgggctgattggcattcatgcttgagtgtcttttttattttctccttggctgctgggagtagcctgaacggcccagaagctaaagagttcatctattaggcatgacagatttgtattcagcagcaagcgcctgaccttgctcaactctcatccattcccatcaccctttctccagatgaaagagtctgcctcacgcctgcttcctggctgtttccttggcaacaataactgggcacgtctgagggaataagtaacggaagaatttgttggtagtgggattaaggagcttttatttttttaaagatattattcacagaattatatgtgaagaatacttaacataagagtttagaaattaaaccaatcatataaatcctagtttctctgttaacctattgtcctttttaggaatatttacaacttcctctaggtgtgttagcctaagatcagagtatttaaactcttggactccatttaaggttaggataaaagcagattagttttgtaataaaacttggattgctttagattttgaattcagagaaacagaagtgacatgccatcatctcccatctggtaggaagaaacttgtgacaacatatctaccccctggttttacattcttttcttccacaaaggaataaaaaaaaataaaagaattatacttagaaggtcacgaatttccatgcttcagtattcttcatgtttaccgcaatttatcaaagatatattcatgttcttgtattctattttggagtacacatcacaagaatctcaaaagacccagtgtccccgtggactacctaaatctgcagtaaaatccagagcatcagctgaagataagcttgtaatttcttcagagaaatgttaatggaatgctatagaataattttggattactttatattagtagactgtaagtggcagagaggcacaatgcagagagttccaacggagagactctgggctatttggagaaaatgtgttctggacttctccagtgagtccatcattacccattagttttgcattaagctaaaagaaatactaaatgacttataattgtcaatttttctattgctctaatattccttttagccttgtaatttacttaggcactaaacatttggacgcatttaagtagatgtaataaataagagtgtgatgataatggaataatgttaatgtagataatttactctagatccccactaaatgcaagcttagcatcacttgcgttatgattttgcatcgcattttctacaaatgatgagagtgcatttaacttctgttataggaatcataattatagctggccacagcattaaacaaagcttatttatctgttttccaattaaaacatcagagatttctaatgcctatgattagtatatgactctgccttgcattctttccagaaagcttaaatatagatttataatattggttatggcagacaaccatttcaagagatgtgtttaatgaaaaaataaagtctgaagaaggtaattactactaggagccgtgtcaaagtgtagagcaccctgctcccaaggctgcggtaagacattcaggatgaactattggttttccatgagaatcaactgtctgtcacagcaaatacatctggtgttgttaagacagcggccagggaaatcttttaaaatagtacctttttatatatcctaagaaaaagcaaacacaactatacttgattttaattactgctatatttttgctgactctgtgacaagccaatataggtgttgttgtaaattctgggtgtcatgtgtctgaactgaggttaaataggttaaggatagcattggaaatgtaaataaagaaaatacctaataaaatatatatatatatataaaaaaggataatgggtcggtacataagcccttgtataccttccatccagtgcatgtttttctactttctgacaatgatgttcctgcttcctttctaaggaacaagagagtgcaaggggcctactgggatgaactaggacagacatttaatattaagatcactgacttacagctttaatgtctccctctccatgtatgttagcatatttgcaatttctaatgatcaggatacacacacacacacacacacacacacacacacacacacacacacacacatatatatatattggccgtactaatcattctcccattgaaacaaacaaggttcagagtatgtactaaatagatttttgcaagccaacaagttttagtgagaactttcaaggagttatttagggaaaatacaaggtatcaatcctatgtgtgtggggggctgtaaggaaggcttctgtttttagaaggcttattttttatgttgcatctcgtttttacttgcttccatgagaaaccaaaaagtaattaagaacagaaatgagatgtagcaaagggtgctactgtatattggatttacacaattttaatagatccagagatttctcctaaaattcttttgagctacatgccagcagggatgagtattacaaggaagtgtgtgtgtgtgtgtgtctgtgtgtgtgtgtgtgtgtgtgtgtgtgtgtctgtgtgtgtattatgtgtaaaaaaaaagaacatgagtgagagagagtatgaataaaagagtattgacagaaagcccaagcagttgtttacaaatcaacttatgtttttccatgtgatgatgatgatgataatccaaacccatgttctatagtgctaaaatactgtcagtttattatgaaataaaatatattgatatttacaatggtataccctacttcaaatattttcttagaaggtttctgagatgaatactataagtataaataatgtaaaagtgaataaagagaagaaaccttgtaggaaaaaaatgaatacatagtgggcctttgaagaatacgaggatgaaccattaggaaagatgctaaaagtgttcaaggagtgaaaaaaattcaatgctaacagtgttgctacatttctatgtttatgagttggtgggtgttttaataaaggtgatttcaggttcagtcagttgaagatctacaaacactatttaatttaagtgtacacgttttctctgttctgtttcctccatcccatgtgcatctacaagggtgaagtgaagaaggtactgttgatgtgtgaaggaagctggccacttctatcctgctactcatgccctggccatatagcctctgttctaatctaaaggaaatacaaactcttgtctctttaaaggttttctatattaatcttactgtattagaatcactcttattaaaatattttgtcaaatacattaaattggacaactataacacaaagagtatataattatatgtacatattaggtaaaacattatatatgagttaagaaaagaaaacaatacaatatatactatctatctatctatctatctatctatctatctatctatctatctatctattggcatgtttccttatcagaataatatttatatgcaaggagctttaatttttttggtgagatatagaaatactaataaactacagatactagactgaactaagatatatgtgactttggtgtaattttaaaggcttcagttaagctataccagtctgtcctgacaactaaagcaaaattctagagacaggacatattgcctcagtttgggcttctattgctgtgataaaacactacaatcaaatgtgacttggggcagaaaaggtacattttaggttagcactctcagatcatactctatcattgagggaagtcatagcaggaactcaagatcgacatgtggacataggaagtgaagtagaggccatggaggaattctgcttactgcctttctctctgtagtttgttcagcgtgattttttttcagcacatggaaccacctaccagagatggtactagacacagtaggcttgatcctctcatatcagtcattagtcaagaaaatgccccacaagcaatgcttacgggacaatcttatgaaagacatttaataactgattgtgccacttcttaaatgaccctggcttagatcaagttgagaaaacatatcatagcaatacaaggacactgtgtgaattaacaacaacaaaagacccagtttcaatccctagcagccacgtggtgactgacaatggatctggtaccatcttctgggctctgtagataccagacatgcaaacacacctttaaaataaaaataaatcttaaaagaaaatccagatattattttttttcacagttttggagggtagaattttgggattaatgtgttgccaaattcaattccttctaactcttctgttcctggccaacttttctgctcctcactgtgtctttgtatgaccattctccagcctttatgttgtgaaggagaagggggaaagaggaggagttataggaggaggatggagaggtggggatggaaataaagagaaactataactatctaatggccacatacctagtggttactttcatatcttgacaagctctgagaattccaatctctgtctagtaagtaatctaaatccaatactaattattcagttgccatggaaattatgtgataaattggctagtggggggcacagtcaactctaagggagaaatatggctgccttctttctatccctagtttcatcagtgcatatgaaacactgtcagggagatatagttctaactttatgtattttgtctggttcagacctagtaatggagacacaccaatcaatctcttagacctttgttcttcttcttcttagaaaaataatggtttgtgtagttatctgtctgtcctaacagaaacatggttttgatttactggtaagatcccactggagtaaacttagagagttatgacaacaaaatgccttcatagtgtcaatgtatcagaattcaaggttgattctgaacactaaccatatagcataccaattttctggagcggttttggagggcattcatatttctatctgtgcttgagagtgtgtttagcatgtcaggggaggctctttagacgccaagcaaattggatgagtggacacttactaaaagatgtggttgcatgcatttctaggggctgagacatgacatgtaagaaacagactgagaggcataagtaggattgaatctttagatcttataacagggcccttttgtgttagggatgctaacacaaaagatgctggcatctgtagaagtgcacaggacgattttccctatacagttatctggagtgctagtcacacaccagcatcctgggagcaataagcacacactagtatttgttcaaaatatttgatttcccttatggcttcttagccaagaaaacgcggagggcaagtcattttttacgaacatctgtgttgcccctttgttccctagccatcctcccaggataggcatcaaatgccgagacttgattcaaagacaccattcaggtgccatcaaggttcttgtgattccctgggacaaggagcactgaaaagtaccactgggttgttcttgcaaatgtgttgacattgatttctcgcctcttggcatggagaagtccccagtgccctcactgacctgttacctgagcctgtaattactctaggagctgggaatgaaaagggcatatctcttcctctttgaggaaatgacaggctcaggacataagcaggctctgccttaaggtaaatctctcaggagagctttaaagactcctaagccttgactcctgcatccttgcatcaatagagaccaagctcattaccactgaaaacgaaggaaagatgcagaatggatgcatgactctgcaaggacttcatcatagagacagtttctaatgtgcacatggaaaataaagatataacttctataattaggtaccttccttcctacacagaaccattgtttgctgcgtgcttttctactacatttcaaataataataaaaatcccatcatgcccttgaaagtgaccttatgttcactagccgtttatatgaacaccattattttttaaagcattttataatcaagtgagtgaatctgtgtatttttgttccttggattactcaacagttagattgtcttactctgtgaaagccactctgaagttgctccatactgaattgtattaaatatctactgcctagaatttcaaactgtgtgtttatagctcagtagccaagctgcttgtgagtgagtgaaccagacagcctgcttagctgagttctgaagttaattattggacactgaaatctaaaggtcagactgtgtctatattcagggcttgttcaacattatacgcatatgggcgccacataaatcccttatctgctgacccaactaataacttccctgtgcaccctaacctatttcctgtcctagagttttagatgcttcagggtctttaaaatggattattatggagcatgtgacccatgggcttttgccaaaaactccttagggctttaaaatcttaaagcagaagactgcctttctgcaatatgcccctcaattatctacacattttgcaaattgcctgaattattccattttatctttgctacccaaggggaaaattaaacttcagaaggaattttgaaaaacatataatacttagggttacttacttaggcatgtttagcacacagtaaaatttcttttcattcatttatttcctccctctcgtacatattcattcattctatgttgttttttggttttgggggttttttgtttgtttgtttgtttgttttttgtattgaccattgctctatggacacaaccatgataagtttcatgagatataaaaaaaagcaagaaacatatcagctacagttatgatattataatttgaaagagaaatccacggtcaactttcatcagtgagagctgggagctggtggacagcacttctgtggatagagcaaataaatgcaaaggtttcaactgatttagggaataatagatgggcaccttaaaatttggtgtctataaaaccataattttttgtttgtgtagggtatgtatcttttcttgaacattttccaatattgtaataaattaaggcaatttactagggccttgatgctgagagatgcttcagagtataagacctttcaggtacaaaatcatgaagactttggttcattccccagaacctacataataagctgggatttctgagactgtgtataatgcaagctctaagggatgcctcaatagcatctagcctttggatcctatagatttgcaccagcacatgcatgccaaaaccacccccccaccccccccacccccccacacacataaccaaattaaataagaagctgttattagctgttaattatatattgtaatgtaccattaataattctgatttcaaattacacaggagagatccaacttactctttaatatatgtattctcaatcaatgcattgtattgtttctggaagtacggtgattttattcctactctggtttcttcaaatccctcacaagtggtacatgtttcctagtgacttactttgtgttagtcatccagtctgctctctaccaatcaccatattctctttctgtaagaccttgtcctatttttaaaagatatattttatttttggtggccaatatatttgatttctgatggccagaaggcaatgttggatactctggggctgaagttaagagtggctataaggtaccccatatggtgctagaaacacagcactagtcctagacaaaggcagtccatgcaaatcgttatgagccagcgatctttaacccagcccctataaaccttttggtaatctgagtaatggaagggtttatcgatgcttttgtttgcttgcttttatatgtaggagattattgtctagtcactcttctataacttggaatttcagacctctctgtcctatgtctgtattgaagaatttttctcctgtgaccaactttggatagtcctctcctatatatttgtgagcagagcacatcatgaggcagtatttttctcaacattcttcacaccttcctatgattttagatcaggggtctaaacagaaacagaggcaacatccttattgtgacttgcttgactttgtcactgttatttgtgaggagaccagttctgtatttatatcacaactcagatatcactttgagaaatccaataaaacgcttgatggttcagattattctccctttctttctcccaagctttctgaccactgcacttgttgggctaaggctcaaggaaggtgtcttatttatagctgcttaaactaaattcttaactaagaactgacaactccttacctgatctcaccatctctgcagcacagaactgagtgtcctcctttcctctgtggctgatccttctttgctcatgggatgtattccctcatatgcattttgtaggcagggtatgcgtagaatgtcattacaagtagaaactggacttattattttcttcagtcctatcaaacatctttacctacctgagtagtatctttcgagggtattggctccgagttcatgtctagtaaagctggacacggtacaacgtaagactggggggaaagttacactgggcttcaaatcaataaaaaacaactaaagatttcagaacagattttaagcatttattgaaatatacacgaaaaatcctacagccctaattaaagatcacacttgtcatgaaacaataggaatcaggcaaacatactgaagggtagtcatggtcatttcacagaatgtctatttgtacaatagaagtaagacatccagctgcctttcaaccctcttctgggcccttgcattgggctcaagatttttggagtttcaaaagagactatcaaacactgatgtgtggccatatatatttaaattattgtgcttaatacaaaaattggaatacatatatatatatatatatatatatatatatatatatatatatataattatttcacacttctacccataaaacatggagaacggcatgtgcgcacatatgtgtgtgtgtgtatgtgcgtgtgggtgtttgtgcatgagacaaaacacaaacaagacagacagacaggcaggcaagctggcaggcaggtaatacatacaagagaggtagacagaagatagagagatcgttgctttaaataaaatatactgtcagtcccctccaaaaaaaaaaaaccaaaccaaaccaacaaataaacaaacagaacaaaacaaaacaaacaaaaaacaaaaatgctatctgtttagaaatgagttccagtgcctagagagtctgataagatactgagggatgcacaggtagcctggtattacctccccatggtgatgagtttatgcttcctagaaacattctgtctcatggtatctaaaatattaaaatcgcaactgcttgtcagtgatcatgactagaaagaggcccataaataataattcacatgataacaagagttgatttttcacttttatttacagtcaaaatatgtgccttaccatgtgggtttattgtggctttatttgtttgtttgtttctttattttatgctcttttacctggttgctcttttatattaatctcactgttctgtttcatttcttatttgtattttctttcttacctcctcaaatagataatcactagaggaataatgcattaaaaataatacatttacctgccccaaccaggggtgcatcccataactagccaccaaacacagacactattgcatatgccagtgagattatgctgaaaggaccctgatatagctgtctcttgtgaggctatgccagtgcctggcaaatacataagtggatgctcacagtcatctataggatggaacacagggcccccaatgtaggagctagagaaagtaccaaggagctgaaggggtctgcaatcctataggtggaacaacaatatgaactaaccagtacccccagagcttgtgtctctagctgcatatgtagcagaagatgacctagttggccatcattgggaagagaggccccttggtattgcaaactttatatgccccagtacaggggaatgccagggccaagaagtgggagtgggtggatagtggagaagggcagggggagagtatagcatttgaaatgtaaatgaaaaaaatatctaataaaaatttttaaaaatacataattttgagaatgcccagtgtaaacagaaaggatattaatgtgttgcctcttttagaagctagaaaaagagtagctaattggtcagaatgtaattatagaataaaaagagatgactgaggctcacaacttttcaattgaattaattatttcatcaatatcatcaatagtcaaatatattgacaaacatagaaaacctgtagttggcattttctctttctctgtgctgtataaatacagagaaagatgctgctctatcttatgagtaaattgaaggttaagtgaaatcagtaatatatccaccagaagtctttcaatctttaggcacatgaagaaaaggcaataacagttttgctattttggtctaggcttgagattaagatagaaaccagccagattgtggaactgtagggaggctaacaattccaagttccaagttgaggtttgcttcccatggctatccctgagctgcagcatctgaaagaaaaaatggccagtctgacatttctgatttttaccaaatctgaggttggtcgtttgtcttttcacacttccaaagttgtttaagttatttaacaatgggcagaaagacattttaaataatggttagagccagaattttaattctgcatgcttacattgatagaataaatctgtacccatgtttgaaatgatctctacaaacctgtaaccctgctgaaattaattgcctaagtgcatatacattagaacatacagagataatgaatcagaaaagaaataagaaaatgggaattcaggtactgccaggaaatgcagacaacccttgggctgactagcaagctgcagttgcactcacaggaaggctctcaagatgtttcattgtctcaccaatctatcaggaaatgagagcatgttaaggaggaaggtagaaaacacccctttgcattgtggcctggaagccgcttggattggatgctcatagcacttttcctgaagcttttaaccttcattgagtgactccaaccagctttctgaagtcatcccacagaaaagcaaattgactcagtaaataaatgaaagctagtctcacatttggaaagtgttacattaaaggcatgtttgaaatattataaaacataaggagcatgttgagcagaaagagggcaaacttacttgtaccattagctccttttttattagatattttctttatttacatttcaaatggtatcccctttcctgttttcccctccaaaaatcccctatcccaccccccccctcctgctcaccaacccaaccactcctgcttcctgttcctggcatttctctatactggggcatataaccttcacaggaccaagggcctctcctcccttgctacatatgctgctagagccatgagtctcaccatgtattttctttggttggtggtttagtctcagggagctcttgggatactggttagttcatattgttgtttctcctaaggggctgcaaaccccttaagctccttgggtagtttctctagctcctttattggggaccctgtgttccccctttttaatagcaaaattattggtatagtatttaaatactcaccaatatttaatgatattttttgtttttattttttaatatacatcatttttattaatcattttatccatttaaatttctaatgatatccccctttctgttcaccactccgcaatcccccatcccatcacccaccctccttctctttgcctctgagggtgttcctccacccactcacccattcctacctcattcctctagcatcctcctacgctgaggcatcaaacctccacaggaccaaggctctcccctggcaatgatgtcagataagaccaccctctgctacatatgtatctagggccatggatccctccatgtatagtctttggttagttgtttagtctctgggagctctgggtggtctggtgagttgatattgttcttctcttatggggttgcaatccccttcagatacttcaggccttcccctaattcttccactggggtccttgggctcagtcggatgctgagctatgagtatctgcacctgtttacatgttttctcaactaacagagtttttatttttgttccttttattaaattctaacagtagtgttataaaggttctcttctataattcaagactaaagtttagagtgatgaaggaactctgtgtttactcagatactaacacccttgcgattagaactcagaggtagctttttcatcaagcactcactcggcatgatagcagaagctggtggtcctatagcgaccatacaaggatgtatgaactgtgtaatgcatttaagaggaaaattgtaagccttgagatttcagagaagctgcaagaggggagctggagactccagaggaccatccttaaatctatggggagtaaatgactttcccttcccttgagagatatcacagggacaggattccctatggataccattcatacccaaaggaccactgacaaagaagttagaagcagacttattctgcagtgacttatgcttttccctagaaatctttttgtccctctgtgtctaaggataatcactgtgcatataatttgcccctactgctgatgagacttgctatttcatttcaaaatagagcatagaagattgacttaccctttaaaattcccctaaaagaatcatctctttcacagagattcttgctcatgactgattcatagaatcaataatatgcagagccagtatcatgagaggttttcttttaaatgagtttccagggctccagtgattcaagaaaaaattccattaagagatattttaaaaattaaaactgaaccctacatgtaatacattcctgaatgcctatttgaaaacaatgtaaagagaaggttaaaaaagctgatgtatattttattgttgttgcaatatttatgtgagatcaaaattcagagggttaggatcctttattttgagacagctcagtaaataagctacagaacatggaggattcgtttttacataactaaatattactttttaatccaattcaaataccaatgagggcttcagggtgatttaaggatggatgtgtccatttataaatcttataattgtccccatttactttccttttggaaacttcctagacttacctctaaataatggtttctattacttttatccatatttcctccaaatgggtcttagtttttcttctttgtttattttataaaagtagtattgggacatcacttacctaccgtggactctgttacttttttgtatagtagggcaaagttggccatagaatgcagtacagattgtacattaagtcaaaagcttttctttttaaaattttaatgtttttggtgtacttgaaagaatgtgtatgtgatagtacagataagcttaagttttgttctttgaaacagtctctcatggaacttaaggaataactgacagccaaccagaacatacaaggcttgttgccatccctaccattctggggttagaggtgctagcttggccctgtctaatttttatgtgggtgctatatattcaaacagagatcttcatgctagaatagcaagcactcttacataatgaattaattttccagaccttaaagcctttgtttatttatttttacaagacattcatttcttttagaaatagtcaatgcatttaatatctaactaatagcagtctttatagtagatcaataataaatttaatctgttaaataaattaatcataatggctgcatcatctattacttacatgtattacatgtattacatgtattatattatttattgggccatatgcacatcctacagagcacatgtacaagttgtgggaaattttgtttgagtcaggtagactttctatcctgctgatcctggggtttgatctcaagttgtccaaattggcggcaagttttatctctgcgccctcttgccagccaattatcattcatcttataactgataatgtcttgagatattctgtttcagtttctgtcacatgtatattgtatatttgtcagtcttgcttggggtcaagaatatacctaagataacaaatttgtaattatgttagttttgttcagtggattctaacattgtgggctgatcattttgcttttgggcatctactgtggcaaactgtcatgatggtggacagaacttaggttaaaattgctcatataatggtggcaagacaggagagaaagagagagagagagagagagagagagagagagagagagagagagagagagagagagagagacaaagagagagagagagagagagagagagaaagagagagagacagacagacagagacagacagagacagagagagagacagggagagagaaacagagacagacagagacagacagagacagacagataaacagcaaatggagagagatgaaagggtcgcaattccaggagactcctaaaggcattgccttagtcacagtgaacagacatcctaacaaaagcaactattacaagagactccattttcctgggggcttgattatggtttcagagtttgagtccattaccatcatggtggcgtgcatggcagcattgagctggagcagatgagagagcttcatccacatcatctataggcaagagagaatctgggtttgacatgggaaggtgacacacttccttcagcaaggtcataccttcaaatcctttcaaataatgcctctcgttgtttatcaatcattcagctatatgagcctacgggagtcatttttactcaaccataacaggcattctgccagatacctgactgacttccttatcctgaaccctaactcttaaaggatccaccacttaccagtatagtataggcagctggctaagccgctagtaaaagggcctttgagggcatgtaagatataaaccttgactgtaggcagctaagtcttatcagcaatatttgattctatcttaatttttctctatttcatattcaggtactttatttacatcatttcctccctttctctttccaaccaactcccattgtgtccgaaaactccctctcaaattcaggacatcttcacaaattcattaaatgcttatgacatatatgaagcaataataattaaagaatgcatatacatatgtgtgtgtgtgtgtgtgtcacacaatgggccataataaatacatctaaaacacaatacttacaactaagactcagaaaataaggagaccagaaccaggaggctcaggatgtgtattgtgaaataaaaaaatctcctgattatatttttactgcattggcatcaacccctctcttgctttaagcaagtggatttctgaagcttttcttctctctaaatttcaaacaattcttaacagtattttcttccctggatagtttgaactatacacataaagacattataaattattaaggcacacaggaatcaaatagccctctggaaagttgtatcacatgacccttttagcttgcagataatatactcatgttaaatgacatcctataaaattgtttatgattccacttcctggactttataataacttgtgctttctaattctgcacattgttattatccagtcttttgttgttgttgttgttgttgttgttgttgttaatatcctaagagcaatgccatatataaattattttaaaatatctggttattgcttatcaagtatgttattcagaaggaaaggaacaacttcccacactgtgaaaagcactctccagagacccagagcttgcatatgctaacaaaatcaaaacagaaagtaagtcaggttgagaagcaaattccaaaggtatttctcttccagcttatcttcagcatattttaactctggtgtgacattgagaaaacagtcaggatgttgctatatgaagcagaagctacagcacgcagtcatgttgtgtacagcacataccaagccaaggggcccacaagagaaccagcagaatatggaatttttgcagactgatgtggccgactatttacattcagatcagacacactgggatgaatggctttcatacaggagtgttcaggagttcaaataaaagaccaggccagagctatcgatttctggctacccttgtatcttgattacatttatggttggattcacaaatctgtgccaaaaaatactcatgaagaaatttttattcatttgatgagagtgttcaaatgagattatcattttgaactttgcaagagttgcccactatcatcaatggaaactcgtggacccttgcattctttgatctgaaattcaagctcctatttaaaattatgtcttacatgcctttttttttctagaaaacagtaacattttcacttttttctattttttaaaaatacttgatgttcattgcttagccactgacttgaagaaaacggaatttgtaagagagaataaaggaaccgatatttgtgggtttgagtggtattaaatgagaaattcactattggtcttaggagaataaactggctcatagctgcaaataaatgatgattttctaatgtggggaggaggagctcacatttcttacatcttaacaaagaaaaattaatataacaattaatagataaaattgaagagaaacatttacacaaaaatatctgcagtattttcacatattcttgtgtattaagtattctcagaactaatttttcatgttttataaatatataaaagctgatgtaaggtaggggtgtgtgtatgtgtgtgtgtgtgtgtgtgtgtgtgtgtgtgtgtgtgtgtgtgttcagtgatgggaagggaagggaatgagtataggggatataaaatggcatgcaatggactcaaacaattacaaaacactttcaaatcctgtttgggactgaaccattgactgttgctcattcataggctcaattcaatgttaggattaagctagttgtgaaaattatggccattataatttctatatatcacaacttgggcaacatattcttaaacgtgttctcacgaccggccaggaagaacacaacaaaccagaatcttctgcggcaaaactttattgcttacatcttcaggagcaggagcgcaagccccaagccccaaaaacgaaaggccccccgcttacatctttaggagccagagcgccagcgcgccagagcgccagagcgcagagcaagagctctattgtttacatctttaggagcaagcgagcaagagccagagccagagagcaaaagcgcaagagcgcaagcaagagagagaatggcggaaaccccgtcccctttaaggagaattatccttcgcctaggacgtatcactccctgattggctgcagcccatggccgagttgttgccacggggaaggcagagtacatggggtagagaaatacccttggcacatgcgcagattatttgtttaccacttagaacacaggatgtcagcgccatcttgtgacggcgaatgtgggggcggctcccaacatctccccctttccttttaataagagcaataggccacccatattaatgagagtggagatagaggtcaaatccccagtgtgcaggtaaaggagccatgtacaggattagctcttaggctcacaggcttttacccagagcaaccctgacctgctcccgtgtcgttttacctggagagaaggacacttggacactcaaccttcttgaaagatgacatgtctccctagaataggctcatatatgtcgcagagcccttctactgcagtgcttagccgtgcaactctctcgggctgctgaagcacactcactctatcccgtgcaatgagactagcctcgtgggatgtaagagctgnnnnnnnnnnnnnnnnnnnnnnnnnnagcatagatatatcaggggaagcaccatgttctagagctgcaagtgcctgggcaataaccaccttgtctctcctagtttgggccttaagcttacagaccaaccaaagaagcaacactaatccacagcaaagtgtatctccaaataatatcaatcccacccattctttaaagaagggaaatgctgaggagatctaattgggtaatcctttggtcagggacaggtccaagcgcgtggagttgacctgaagtctcaattcccgaaggatctgttcaaattcagccgtccaattctgtaacatatactgaaaaagactttttgacaaattagctgccctagtaaatttctcatactgaatggaagtaacacacaatcccggaaacttttgttcacatcccagctgagctatttgccataatacatctagttgtttttggacaagatctatgagttgactaaccagcatgagaccaccctgtatcttgacattagctgaggcctgtttatctatgactgtagtcactgaggctgacaaagtgttaatggtgtcagtcgtctggacctgtccagacatagccaaggctgtctgaatcaaggccaaacccagttcctagttagtggtaaaaaagcaggggaatacttgagcattatacatcaccgtcattaggagtggaaatgtcgacattatcccccaacgctgctctctctttattattgacgccctggacatcaccaagacgagggacatcagtattcccttggtcagtctggatttttcgggtgagtctttctggtatccaaaatgggttgtcttcattctgtgggaaaacacagatagctcccctggatcttatcaaaataggatctgggccataccatttattatcaaggacatttttccatttaaccatctctttgggcctatctggctctgaacaatgacgttcagccgcagtatggccatgaacatcaatatttaaaaaattgagtgtaaagagtgccatagacacagacactcttggtactcggggtagagtctcctcaattcccctcttctgttttataagataggctttgagggtgcgatgcgcctgacgccacgagggtttacccctacatgagtagataaaatttgacaacaatctaaaggcattattaagtaatcagaatcattttcagtagaaccaatccctctggcggctcaaggaatactagaggaaggaaaacagccatgtaggcttggcaaaattattagttgagctattctgtccccttgtgatatagaaaagacaacttgaggacaagaacagagaacctgaagttccctttaacaatcctgatctacaactccagagtggacaataagaccttgtaggctgcaagagcctgcctctgtcatactggccacaaaatctgagaaggactcttaaggtccctggatgatctttgttaattgtccagtggctttacctgctcgggagagcgccttccaggccctaatagccttttcatctgattcagaactattaaaaactggctctttgagctcatctagtgatgagtagaggctccttttcctagaagcctccgctgattgatcttttttcttttccttccttctaatctctccccaggtattcttacctgaccttaacttttcctcgggtttaagacccttggaaaggcctgtatacttattttgtgtaccatattttctctttgctcctattctctctccccgctttacttctgatagactgtcctgaatttcatctagaattttcagccctatcttaatcacttgataacatgtgaaaaagaacaaaagggctcctaacactagaaaaagttcaaggccaaacataccttgtaaagctatttcccactttacttctgatagactgtcttgaatttcgttagaaagtttaagaccaggcttatcttgtaaagctatacttacgggtaccctgttccccagctgaagagttttgaatttacacagttgaatccttctcaacagtctgtgatgcgggaacactttattaccatcgttccccagctgaagagttctgaatttacgcagttgaatccttctcaacagtctgttttacgggaaccttcgttaccatgacccgcagttttggttccggaatgagggatcttccttgcgccggtgatggttaactcccgtcccgagttttcttgtattttctcgtcccgggtttcggcaccaactcttttttttttttgttttgtttttttttttttttttttttttgtttttttttttgaagagttgtttcataatgtatatttgcatatgtatatatatacacatatatgagacatatacattatacacacatacaatataatataacatatataatgagttttataaggtacatacatactttgtaacaaaaggcatgtgtctaatgtatctccctgtcctttctccacagccccgaaacatttctgtcaagttggctgcatttatagggaggaggttcttttttttttttttttttttttttttcatttttttttnnnnnnnnnnnnnnnnnnnnnnnnnnnnnnnnnnnnnnnnnnnnnnnnnnnnnnnnnnnnnnnnnnnnnnnnnnnnnnnnnnnnnnnnnnnnnnnnnnnnnnnnnnnnnnnnnnnnnnnnnnnnnnnnnnnnnnnnnnnnnnnnnnnnnnnnnnnnnnnnnnnnnnnnnnnnnnnnnnnnnnnnnnnnnnnnnnnnnnnnnnnnnnnnnnnnnnnnnnnnnnnnnnnnnnnnnnnnnnnnnnnnnnnnnnnnnnnnnnnnnnnnnnnnnnnnnnnnnnnnnnnnnnnnnnnnnnnnnnnnnnnnnnnnnnnnnnnnnnnnnnnnnnnnnnnnnnnnnnnnnnnnnnnnnnnnnnnnnnnnnnnnnnnnnnnnnnnnnnnnnnnnnnnnnnnnnnnnnnnnnnnnnnnnnnnnnnnnnnnnnnnnnnnnnnnnnnnnnnnnnnnnnnnnnnnnnnnnnnnnnnnnnnnnnnnnnnnnnnnnnnnnnnnnnnnnnnnnnnnnnnnnnnnnnnnnnnnnnnnnnnnnnnnnnnnnnnnnnnnnnnnnnnnnnnnnnnnnnnnnnnnnnnnnnnnnnnnnnnnnnnnnnnnnnnnnnnnnnnnnnnnnnnnnnnnnnnnnnnnnnnnnnnnnnnnnnnnnnnnnnnnnnnnnnnnnnnnnnnnnnnnnnnnnnnnnnnnnnnnnnnnnnnnnnnnnnnnnnnnnnnnnnnnnnnnnnnnnnnnnnnnnnnnnnnnnnnnnnnnnnnnnnnnnnnnnnnnnnnnnnnnnnnnnnnnnnnnnnnnnnnnnnnnnnnnnnnnnnnnnnnnnnnnnnnnnnnnnnnnnnnnnnnnnnnnnnnnnnnnnnnnnnnnnnnnnnnnnnnnnnnnnnnnnnnnnnnnnnnnnnnnnnnnnnnnnnnnnnnnnnnnnnnnnnnnnnnnnnnnnnnnnnnnnnnnnnnnnnnnnnnnnnnnnnnnnnnnnnnnnnnnnnnnnnnnnnnnnnnnnnnnnnnnnnnnnnnnnnnnnnnnnnnnnnnnnnnnnnnnnnnnnnnnnnnnnnnnnnnnnnnnnnnnnnnnnnnnnnnnnnnnnnnnnnnnnnnnnnnnnnnnnnnnnnnnnnnnnnnnnnnnnnnnnnnnnnnnnnnnnnnnnnnnnnnnnnnnnnnnnnnnnnnnnnnnnnnnnnnnnnnnnnnnnnnnnnnnnnnnnnnnnnnnnnnnnnnnnnnnnnnnnnnnnnnnnnnnnnnnnnnnnnnnnnnnnnnnnnnnnnnnnnnnnnnnnnnnnnnnnnnnnnnnnnnnnnnnnnnnnnnnnnnnnnnnnnnnnnnnnnnnnnnnnnnnnnnnnnnnnnnnnnnnnnnnnnnnnnnnnnnnnnnnnnnnnnnnnnnnnnnnnnnnnnnnnnnnnnnnnnnnnnnnnnnnnnnnnnnnnnnnnnnnnnnnnnnnnnnnnnnnnnnnnnnnnnnnnnnnnnnnnnnnnnnnnnnnnnnnnnnnnnnnnnnnnnnnnnnnnnnnnnnnnnnnnnnnnnnnnnnnnnnnnnnnnnnnnnnnnnnnnnnnnnnnnnnnnnnnnnnnnnnnnnnnnnnnnnnnnnnnnnnnnnnnnnnnnnnnnnnnnnnnnnnnnnnnnnnnnnnnnnnnnnnnnnnnnnnnnnnnnnnnnnnnnnnnnnnnnnnnnnnnnnnnnnnnnnnnnnnnnnnnnnnnnnnnnnnnnnnnnnnnnnnnnnnnnnnnnnnnnnnnnnnnnnnnnnnnnnnnnnnnnnnnnnnnnnnnnnnnnnnnnnnnnnnnnnnnnnnnnnnnnnnnnnnnnnnnnnnnnnnnnnnnnnnnnnnnnnnnnnnnnnnnnnnnnnnnnnnnnnnnnnnnnnnnnnnnnnnnnnnnnnnnnnnnnnnnnnnnnnnnnnnnnnnnnnnnnnnnnnnnnnnnnnnnnnnnnnnnnnnnnnnnnnnnnnnnnnnnnnnnnnnnnnnnnnnnnnnnnnnnnnnnnnnnnnnnnnnnnnnnnnnnnnnnnnnnnnnnnnnnnnnnnnnnnnnnnnnnnnnnnnnnnnnnnnnnnnnnnnnnnnnnnnnnnnnnnnnnnnnnnnnnnnnnnnnnnnnnnnnnnnnnnnnnnnnnnnnnnnnnnnnnnnnnnnnnnnnnnnnnnnnnnnnnnnnnnnnnnnnnnnnnnnnnnnnnnnnnnnnnnnnnnnnnnnnnnnnnnnnnnnnnnnnnnnnnnnnnnnnnnnnnnnnnnnnnnnnnnnnnnnnnnnnnnnnnnnnnnnnnnnnnnnnnnnnnnnnnnnnnnnnnnnnnnnnnnnnnnnnnnnnnnnnnnnnnnnnnnnnnnnnnnnnnnnnnnnnnnnnnnnnnnnnnnnnnnnnnnnnnnnnnnnnnnnnnnnnnnnnnnnnnnnnnnnnnnnnnnnnnnnnnnnnnnnnnnnnnnnnnnnnnnnnnnnnnnnnnnnnnnnnnnnnnnnnnnnnnnnnnnnnnnnnnnnnnnnnnnnnnnnnnnnnnnnnnnnnnnnnnnnnnnnnnnnnnnnnnnnnnnnnnnnnnnnnnnnnnnnnnnnnnnnnnnnnnnnnnnnnnnnnnnnnnnnnnnnnnnnnnnnnnnnnnnnnnnnnnnnnnnnnnnnnnnnnnnnnnnnnnnnnnnnnnnnnnnnnnnnnnnnnnnnnnnnnnnnnnnnnnnnnnnnnnnnnnnnnnnnnnnnnnnnnnnnnnnnnnnnnnnnnnnnnnnnnnnnnnnnnnnnnnnnnnnnnnnnnnnnnnnnnnnnnnnnnnnnnnnnnnnnnnnnnnnnnnnnnnnnnnnnnnnnnnnnnnnnnnnnnnnnnnnnnnnnnnnnnnnnnnnnnnnnnnnnnnnnnnnnnnnnnnnnnnnnnnnnnnnnnnnnnnnnnnnnnnnnnnnnnnnnnnnnnnnnnnnnnnnnnnnnnnnnnnnnnnnnnnnnnnnnnnnnnnnnnnnnnnnnnnnnnnnnnnnnnnnnnnnnnnnnnnnnnnnnnnnnnnnnnnnnnnnnnnnnnnnnnnnnnnnnnnnnnnnnnnnnnnnnnnnnnnnnnnnnnnnnnnnnnnnnnnnnnnnnnnnnnnnnnnnnnnnnnnnnnnnnnnnnnnnnnnnnnnnnnnnnnnnnnnnnnnnnnnnnnnnnnnnnnnnnnnnnnnnnnnnnnnnnnnnnnnnnnnnnnnnnnnnnnnnnnnnnnnnnnnnnnnnnnnnnnnnnnnnnnnnnnnnnnnnnnnnnnnnnnnnnnnnnnnnnnnnnnnnnnnnnnnnnnnnnnnnnnnnnnnnnnnnnnnnnnnnnnnnnnnnnnnnnnnnnnnnnnnnnnnnnnnnnnnnnnnnnnnnnnnnnnnnnnnnnnnnnnnnnnnnnnnnnnnnnnnnnnnnnnnnnnnnnnnnnnnnnnnnnnnnnnnnnnnnnnnnnnnnnnnnnnnnnnnnnnnnnnnnnnnnnnnnnnnnnnnnnnnnnnnnnnnnnnnnnnnnnnnnnnnnnnnnnnnnnnnnnnnnnnnnnnnnnnnnnnnnnnnnnnnnnnnnnnnnnnnnnnnnnnnnnnnnnnnnnnnnnnnnnnnnnnnnnnnnnnnnnnnnnnnnnnnnnnnnnnnnnnnnnnnnnnnnnnnnnnnnnnnnnnnnnnnnnnnnnnnnnnnnnnnnnnnnnnnnnnnnnnnnnnnnnnnnnnnnnnnnnnnnnnnnnnnnnnnnnnnnnnnnnnnnnnnnnnnnnnnnnnnnnnnnnnnnnnnnnnnnnnnnnnnnnnnnnnnnnnnnnnnnnnnnnnnnnnnnnnnnnnnnnnnnnnnnnnnnnnnnnnnnnnnnnnnnnnnnnnnnnnnnnnnnnnnnnnnnnnnnnnnnnnnnnnnnnnnnnnnnnnnnnnnnnnnnnnnnnnnnnnnnnnnnnnnnnnnnnnnnnnnnnnnnnnnnnnnnnnnnnnnnnnnnnnnnnnnnnnnnnnnnnnnnnnnnnnnnnnnnnnnnnnnnnnnnnnnnnnnnnnnnnnnnnnnnnnnnnnnnnnnnnnnnnnnnnnnnnnnnnnnnnnnnnnnnnnnnnnnnnnnnnnnnnnnnnnnnnnnnnnnnnnnnnnnnnnnnnnnnnnnnnnnnnnnnnnnnnnnnnnnnnnnnnnnnnnnnnnnnnnnnnnnnnnnnnnnnnnnnnnnnnnnnnnnnnnnnnnnnnnnnnnnnnnnnnnnnnnnnnnnnnnnnnnnnnnnnnnnnnnnnnnnnnnnnnnnnnnnnnnnnnnnnnnnnnnnnnnnnnnnnnnnnnnnnnnnnnnnnnnnnnnnnnnnnnnnnnnnnnnnnnnnnnnnnnnnnnnnnnnnnnnnnnnnnnnnnnnnnnnnnnnnnnnnnnnnnnnnnnnnnnnnnnnnnnnnnnnnnnnnnnnnnnnnnnnnnnnnnnnnnnnnnnnnnnnnnnnnnnnnnnnnnnnnnnnnnnnnnnnnnnnnnnnnnnnnnnnnnnnnnnnnnnnnnnnnnnnnnnnnnnnnnnnnnnnnnnnnnnnnnnnnnnnnnnnnnnnnnnnnnnnnnnnnnnnnnnnnnnnnnnnnnnnnnnnnnnnnnnnnnnnnnnnnnnnnnnnnnnnnnnnnnnnnnnnnnnnnnnnnnnnnnnnnnnnnnnnnnnnnnnnnnnnnnnnnnnnnnnnnnnnnnnnnnnnnnnnnnnnnnnnnnnnnnnnnnnnnnnnnnnnnnnnnnnnnnnnnnnnnnnnnnnnnnnnnnnnnnnnnnnnnnnnnnnnnnnnnnnnnnnnnnnnnnnnnnnnnnnnnnnnnnnnnnnnnnnnnnnnnnnnnnnnnnnnnnnnnnnnnnnnnnnnnnnnnnnnnnnnnnnnnnnnnnnnnnnnnnnnnnnnnnnnnnnnnnnnnnnnnnnnnnnnnnnnnnnnnnnnnnnnnnnnnnnnnnnnnnnnnnnnnnnnnnnnnnnnnnnnnnnnnnnnnnnnnnnnnnnnnnnnnnnnnnnnnnnnnnnnnnnnnnnnnnnnnnnnnnnnnnnnnnnnnnnnnnnnnnnnnnnnnnnnnnnnnnnnnnnnnnnnnnnnnnnnnnnnnnnnnnnnnnnnnnnnnnnnnnnnnnnnnnnnnnnnnnnnnnnnnnnnnnnnnnnnnnnnnnnnnnnnnnnnnnnnnnnnnnnnnnnnnnnnnnnnnnnnnnnnnnnnnnnnnnnnnnnnnnnnnnnnnnnnnnnnnnnnnnnnnnnnnnnnnnnnnnnnnnnnnnnnnnnnnnnnnnnnnnnnnnnnnnnnnnnnnnnnnnnnnnnnnnnnnnnnnnnnnnnnnnnnnnnnnnnnnnnnnnnnnnnnnnnnnnnnnnnnnnnnnnnnnnnnnnnnnnnnnnnnnnnnnnnnnnnnnnnnnnnnnnnnnnnnnnnnnnnnnnnnnnnnnnnnnnnnnnnnnnnnnnnnnnnnnnnnnnnnnnnnnnnnnnnnnnnnnnnnnnnnnnnnnnnnnnnnnnnnnnnnnnnnnnnnnnnnnnnnnnnnnnnnnnnnnnnnnnnnnnnnnnnnnnnnnnnnnnnnnnnnnnnnnnnnnnnnnnnnnnnnnnnnnnnnnnnnnnnnnnnnnnnnnnnnnnnnnnnnnnnnnnnnnnnnnnnnnnnnnnnnnnnnnnnnnnnnnnnnnnnnnnnnnnnnnnnnnnnnnnnnnnnnnnnnnnnnnnnnnnnnnnnnnnnnnnnnnnnnnnnnnnnnnnnnnnnnnnnnnnnnnnnnnnnnnnnnnnnnnnnnnnnnnnnnnnnnnnnnnnnnnnnnnnnnnnnnnnnnnnnnnnnnnnnnnnnnnnnnnnnnnnnnnnnnnnnnnnnnnnnnnnnnnnnnnnnnnnnnnnnnnnnnnnnnnnnnnnnnnnnnnnnnnnnnnnnnnnnnnnnntttgtgttctcttagtgtctgtataacatctgtccaggctcttctggctttcatagtctctggtgaaaaatctggtgtaattctgataggcttgcctttatatgttacttgacctttttcccttactgcttttagtattctatctttatttagtgcatttgatgttctgattattatgtgtcgggaggaatttcttttctggtccagtctatttggagttctgtaggcttcttgtatgttcatatgcatctcattctttagatttgggaagttttcttcaataattttgttgaagatgtttgctggacctttgagttgaaaatcttcattctcatccactcctattatccgtacgtttggtcttcttattgtgtcctggatttcctggatattttgagttaggatctttttgcattttccattttctttgattgttgtgccgatgttctctatggaatcttctgcacctgagattctctcttccatctcttgtattctgttgctgatgctcaaatctatggttccagatttctttcctagggtttctatctctagtgttgcctcgctttgagttttctttattgtgtctacttccctttttaggtctagtatggttttgttcatttccatcacctgtttgtatgttttttcctctttttctgtaaggacttctacctgtttgattgtgttttcctgtttttctttaaggacttgtaactctttagcagtgttctcctgtatttctttaagtgatttattaaagtccttcttgatgtcctctaccatcatcatgagatatgcttttaaatctaggtctaggttctcaggtgtgttggggttccctggactgggcgaagtgggtgtgctgggttctggtgatggtgagtggtcttggttcctgttagtaagattcctccgtttacctttcgccatctggtaatctctggagttagtagttatagttgactctgtttagagattgttcttctggtgattctgttaccgtctatcagcagacctgggagacagattctctcctctgagtttcagtgctcagagcactctctgctggcaagctctcttacagggaaggtgcgcagatatcttgtatttggacctcctcctggccgaagaaggaggcccaaaacaggacctttctcagacagtgtgttgctttggcagttcccaggtggtacagactctcacctaagcagactaaattcctaagttccttggagtcccgggaccaagatggcgaccgctgctgctgtggcttaggccgcctccccagccgggtgggcacctgtcctccggtccggaaggtggccggctgtccccggcccacacagggtgctgcctcagcgcctctgtgcttctgcctgttccagaagctgtcaggttctctggcgcaccctctcacctgttcagactaatttcctaagttcggcgggtctcggaccaagatggcgaccgctgctgctgtggcttaggccgcctccccagccgggcgggcacctgtcctccggtccggacggtggctggctgtccccggcccacaaagggtgctgcctcagcgcctctgtgcttccgcctgttccagaagctgtcaggttctctggcgcaccctctcacctgttcagactaatttcctaagttcggcgggtcccggaccaagatggcgaccgctgctgctgtcggcaccaactcttaaacgcgttctcacgaccggccaggaagaacacaacaaaccagaatcttctgcggcaaaactttattgcttacatcttcaggagcaggagcgcaagccccaagccccaaaaacgaaaggccccccgcttacatctttaggagccagagcgccagcgcgccagagcgccagagcgcagagcaagagctctattgtttacatctttaggagcaagcgagcaagagccagagccagagagcaaaagcgcaagagcgcaagcaagagagagaatggcggaaaccccgtcccctttaaggagaattatccttcgcctaggacgtatcactccctgattggctgcagcccatggccgagttgttgccacggggaaggcagagtacatggggtagagaaatacccttggcacatgcgcagattatttgtttaccacttagaacacaggatgtccgcgccatcttgtgacggcgaatgtgggggcggctcccaacaacatataagttacaaagagcttataggctagcaggatgcctagagactctcagcactctgtaccccggcacaagagaattgcaattaattaagtaacacttttggtcataaaaaatgactaatattcttttatggtaaaatatctattatggagttcctattcactcaatgtgtgtatttagttaggtgtttagtattatcaataatgtcagcttagaattgaaacaaattattttatatgtaacagaacatcataagaatgttttactaagagaatcaaaaactgttatttgtggagatcatttttcttactaaacattactctgtgcttttactaaaacattcatttgcctctttcgttatttacaagtaaccactgggacatacaatacatgccggtagcgaacagacctgagaaaaactcttatcccagaagaaaaaagaattcagagtacaggttggccaactgtaacctaatgattgtgctgaagaagtctctttaacaataacattcaagtgatatgttggtaaatcttcagggtgaggtcatatcggtaacatatgaagtgtcacgaggattggtgtgaacactctgtctcttctgcccagttaatcctgttctgtgttctctaattcttctcaaagatatgcaatgtttatcaccagccactttttgaattatgaaaatggtactgagtttcaggtcaggtagtatcaaaattgatttacagaagtttaacttatactttgcttaatatcatgtccttttgttttatgctttgcaaaaactaatctaaggctctattccaatctcaacataagatttctcaccttttcttgattcataatatatactggtaaccttttacaaacactacacatttatctcacccatttccctaattcctatgtctagatctaaagggcaaattcctcatattaagttagttttgaacaagcaaaatacatttctttttctctagtgattggttttcaaccatcccatcaggagaacttttaaataaccaaatttatattgaactatttttcagatgagaagttgtaatcaatgaaaatccagtaaaatgcaaatataaatccttcaaatgtcaaaagaaaaagtctgagctgagctttgaaatactaaacattgaaaaaaaatttgcaatataagcttaagactttccttgaaattttcttatccaagatactataatctatttctaaatcaagagccattttggctgtattgcattagtaaaaattgcctgtgccgtatttcttccctaagtttacttgcctatgctattttgacctaaatattacagttccattttgttcaaactaaaattggccttcctaaatttgtttaaaattaaagaacaggcaattagggcaaaaaggagtcagggatgaaactagccttacatttctgcagttctcacctgccttatttttctttcagcattgttattagctgccaatctttttgttgctaaatgtttgaatttcttgattgttcaaattgagtagatgtttctgatttatcatactcatatctcattaatattcagatagctattagaaaataaggtagccttttggcttgaattttaagcattcattttcagtcatatttcagtctagggctttctcttctgcacatattacatttcttttattacccagagaggaatacgtgaattttatagaccacattgcccactgatttattacttctgttctgtagttttggagccaatatagacagccagtaatatcagataagtaaatacctatgcttatgaaccaataaaatatgaatattcatattattaatttgagctgtgtcaagttgacacttcacatgaaatgattcatttcacttttattctctcaaattgttgagaaatgtagtgccctttctatctcatgggtcatgaataacaggtttctagcttagattggctgataggttgtactgatgtggagattgttgttagcacttctacatgggacaccttaccttttcataagcattttgttggttaagacgttaccaacacacagtttaaagcaacccgaacatcaattctgtacttgctataagtgtgatgcaattatatacaaactactattaattaatcaaaaaagagcctaccaatgacattcagtggcatgatcagcaatattttctcatatgccatctctatatattttagattacttatagtacaatgtgtatttttctttcttacttgtatttatccttcactcatataacacatcccaaccacagcctctgttcctaccaattcctctcccagatccactaatccactacttcttcatttccctttagaaaagagcaggcacactgtcaatattctaaacacaccatccataacatttcagcataagtattttttataagtcatataactttataagttaacaattagacactatgaagaaagaaatttcattggagctcacactattcttagctatttccaagttggcatactgatgtggctttcagttgttttcactcattgggttctccttttatatactaccattatatttcctaagtttatatttgttttaggggatatttgcagaattgggattaacagttctgagtgcatgctcaccataattgttgctgaattttctcaagtgccttgaattaacggagatgatatgtgttaagtcatttcggtttggcaggcagcgcactaggcatttaagtctgttctctcacaatcattccacaaaataagcatcaatactcttgcctgtagatggagaatcaagactagttttaacagggtccaaattacaacctagcatgtttgacataaaagccaatgcagaagcattttcggcctcttacaatataatggaggtgcactggccttgcatacacatgataggtcactatctgactctattctttcctgaggtgaaatgtgccttactctttagctctctttctttagatctagtgaggcagaatccatcagttttctgttctttcatctgctgggaataaggatatctagtggtcttttattttgggcatctcaagagaggtactgcagtgcacttatactgtgccctactgagttatatcacagaattttacaaattcggaggcaaagtctgcttgtggaataaaaatataatgggtcatgatcgcttcttagagcttggtaaggttggtgtaacccttttccccttggtacaaccttttatccccttggtacaagaagttcaataaacccagagattgtaccttgtccttatattatgtctattttggcaattgcctcccatctcatcaatttcctgacctgacaatgttggttgtttgcttagtctccttcagcatgtgtcctgacccagctttctcacccatagtgagcatacagttgagcagagttttcattctcacagatctgcccatttacacttaggaaaccttgaaattagaccagagttactctggtggaaatgaaagccaccagcagacaataaactttacagaatttaatgaaaatattacttttcatgaaagaatactggaatataacttgttttaataatataggtcgaatcagattttatcttgaaaggttagatatagccagaaatagagataagtatagattataaacatagctagatacttttgaactcaggaacttatattcctaggaaaatgttgtactactgacccattgcaatagtcaatgttgtattctaatcctatcattatctccagtgagatttaatttcacacattaatgatgattgttatgagcatattcaatttttcatgtaaccactaccatgcagtcatagccagcaccaaattactgaaaaaatctatttccctttattcaatggtgcaacacagttttgcaaccactcagctgatgccaacataggatctcccatttcttttcacattgtggatgggtttgttttagttctcgccagtgtctttatcctgcacagcttgggtaggtagagtgtggctgagaaaaggaagatgcagattataactagataatatagaagcaaacagtctgttgtcaaatcagaaccactagaaatttaataatgctctaaaaaatacttcctagcttcactgtactgtaattttaacttgaaaatttcagaaaattatagtcatagccatcctagttttagctatatttcacaaatgaccatttttttccaagtcctggaaatgtccgcatgttaactttaacaaattaattttatgggaaaatttatctttctgaaaattgggccattagaaaatgttgtatttgacatggtgtctagcaggagcgcaggtcagggatattcccatgatgttgctgctggaggccatgtggatctatgtagtctgtgcctgaagttgtgatgatgttcacaggtcatgttgaggtccatgccctaggctgcagatgagagccttgatggtgtttttagtgtgtattgccactggagaccatactgaggtctgtagtttaacactggagaccacgaggatgcccatgatcataaccagaaatgatttggaagttcatgagctatgcagccactgactgtaaagggcaatgaagtatcttttcagtagtatcaatgactgcagtctcacagttgaggatgtgagacatagaaggtttctatgacaacctctcccaccgccaataaaaagaaacagtccagacaggaagccattgaagagaactcttaaacattgtggtagggatgatgaaataaacatagctcttcacagtttacggcttctggcagtagaggaggtagggaaggacttggttttctttaaagggctggccactggaagtttgaccatgttccaatgagtatatgaacaacacaaattggacgtggtatttttgttgttgttgttctttttcttggagagacagtcagaacagcgtggctggggatagacctgggaagtaaatgtaatcgaggtgcattctatcaatttctcaaatagtcaataaaaatattatgctaaaaatactatattttaaacattttcacattttgttaaatggtgtgcatggatattttgaaaccttcttatataaagtgaaaatctattccatgtaattaggatgttaaaacttgcatctgtaataggaaactgcattttatatttagaatgaaaactctagaaaattttttacttagacttttattacacttacctcattttatggagtgatggggggagctttgggacacaatatggagtcagaggacatcttataggagttagttattttatcccaccttgtgtttccaaaaaagaacacagaaccttaatcatggttgcaagctccttcattacctgagccattcaccagaacaagaattttatttttaattactgtaattttttctgtgaaaaatgttttatcaaattggtagttatagaaaatcatcgtcagtcaaataaaatgttttagcttcattctttgctacatagaagaatctacttgtatttaataaccagaagatctatgtacactaataagagagttagataatgggattttactccaagctctgcttatctctatgttgatcaaagctatttgaatagcaggaaagacaaggaaaaattactctgctaataagtacagtaatgattgtgaatagcgaatattggaatgttttaatgaataaagatgcaagtgattaggtatcttgctgcataattattaaaatgttgtctggtaatgatatacttgttttaaatttacatctttacaggttcagtgtagagtcacagtttctaatctgcaccaattttcccttcttgccattcagagagaataatgtccatgaatgtgactcacagactgtttaaaaggggctccacatttaaattaatagatttgtgttgggagccatcgttactatgcagaaagattactgagaaattacattgaaataagacgatgatgactaatggaattgttactacgctatattttgtgaaaagaatcagagagaaaatatattttatcatagaggaaaaatatgaattacatatttaacacctcattaaatatgtagattgcagtgaaatccgggcagaaagctaaggatagtcaacttccataaagccatcagctcccatttattcattagtttcatataggatacagctacaaaaatttggatatagaaaagtcaaagaggcaacagagttagttaagcatggaaatatgatgtaagcaacaaaaatcttatttaaaaaaatggttcattccaaaggtaattttggggtcatttgaattataaatataaatctatttttccaatcaacagtatataaaatgatgtgaactatgcttaaacagtgaaatttagttaagggctgcagcagtaccatgacagtgcaattgaacacagttgttttgtgctttttattcaaagaccatgtgtttcttctctgcattcttttccttcattcatttatcctgtcccacattcctccttccctctctcttcctctcccttacattcttgttaatgtgacttatcattttaaatgaaacgtccacaggaccaagggcctctcctcccatagatgtcagataaggccatctttggccacatatgtatctggagccatggctccctccttggttgatggtttagtccatgggagctctgggtggtccagttagttatattcttactatgagtttgcaatccccttcaggtccttcagttcttctcctagctcttccattggggtccctgggctcaatcccatgattggatgtgaatatctggatctgttttggtcaggtgctgatagaacctctcagggaacagacataccaggctcctgcccataagtgcttcttggaattagcaatactgtagggtttagtgtctgcagatgggatggatccctaagtatggcagtctctggatggcccttcctgttttttgttcctgcctttcctttggggagaaaaatttctgagatatgtaagtgatcctctccctcaaacggaggccatgtctatctactggaggtggtctctaaagattgtctctactttgttgggtatttcggctaatatcattactgttgggtcctaggagcctcttgcttagcttccctttagtgtgggactttctagtggctacccctatttccccatcccccactgctacatgtttccattcaatttcatgaccctctgtacttcattccattccaatacctgatcctgctcccccccccaccctatctcctctcctctcctctctccctcccaggtccctcactcctacctcctgtgattattttgttccccattctgtgtaggattgaagcatctactctttgttcttccttcttcttaaactccaaatggtttgtgggttgaatcgtggatattctgagcttttgggctaatatccacttatcagtgagtgcatatcatgtgttcttttgagtttgggttaccttactcaggctgatattttctgagcagtgccggtggaggccacagagaatatcagatatcttgacaatggaattataggaagttgtaagcttccaagtgggtattgggaactgaacttggctcctctgcaagagcagcccatgcccttgattcctgagccaaccctctatcccataaatacccttttaactcattcctctggttatttagctataatgttgagatcattttagaccatgctccttaccctctaggctctgtcctccctttgcactggcaacaggcacagctgtttccctctgcctttcattgtgtgttcatggcaccattttcttccctgatgcttccatttctcatcctcccctactccctcacagctctcaaacatgaagtggcctgtttctaagtcatctggttacttcttcctctagttctttgttctgggtgtatgtgactcctgggctgctgttctgcacattgctgtcttcactttctagttgatgaagtcttcagtgaggcacatcagaccctagttagatgagcagttctcagctcaatcatgtttccagcagatgcacaggtaattgaaactttctgctgatggagtgccttccctgtataccattttttaaatattttatagatattggatcgcagttttctctaacccactggttatatcccattcccattatagcactttggttcttttgaaatctatttttagtacatagtttcctcctggggtttcttctctttaaacttggtagattttcttttaaatgctgcctgtcgctttgtgccctggctgtgctaaacattaaacagctggtgttgaaaaaaaaaaaaaacagaagcaaatataagcaaggctgtgcaagaaccaagggacagagattagccatgtgaggacagcaaaacatttcccgcagcatgctttgggggtgagaattagaattctcctagagtctataatcattgcagtccatagcagaggctgctggcgataagatgagcataagcaagaatgtgttgctaaacatacttaacaatttccattttcaggaaaccttttaactgaatgacttaaaatgagttaaatctctagcataccataattcatttttccaactcaatccatcaattaatggctagcctaacacattaaaaatcataatttgtagaaagttaatatcttctgaaattaatttccaatttaagaatgaagaatttatataatatagtcgtcagatacaaactggttgaaaactgtatcatgtttgtgacaatcaatgaaaatctttagggtcaatatggttgttaaatctacaatgtgttcaccctgtgacaaggagaaatagtggaaaccatgtcttgtctctttgacctctccagccttgtgatagtactggaagtcacattttatgtgagtagtcttatgataccacaggaagtcacattctttgtgaatagtgtcatgatttcacaggaagttactttctgtgtaaattccttatgacagtcagatactgttcatacccaaggaaccagttcaattgtgagactgctcaaattgctcagtgctcacatactatgtgcatgcttccttcaggtccctgaatatgatataacccctagagtaatcatcatttgcattgttaaaattttttccccaaacacagaaaaccctgaaggttttacctacttttcattctccataattatatattttaacctattctttaaaccaagacgtgttttagaagaagcaatccaagatgaccctggggaagaaatcttttgaaaaagatatcagaagcataataatttgctggtctgccaaatcttcatggttttacaatttaatttattattctcttttcaaactagcaccttttaaaccgaataggcatatcctccagtgacaatagaggtagacatgcccattcctgataactttagtgcatacccttgcacaaagaagctgttttctatgtttggaaagttttccataagaccctctctccaagcatcgtatatttttatcattatttctcagtaatactctttccattggtcactcgaagccttaccacagggatttttgagactgtattattgtattcagcaaatctttagggagagtaagttcacatgattccatagttgattttgctcttgacattttgggccccaaggcactaagcagtatatctgtaaccatgtcaaaccaacatagtttgaaacatagctctgagcccaacacagacacttctctttttattatctaagttaggttttgaggaattttcaaagatgagagtgcctgtgtatgcacaaggggggggggggcaaaaagggagagaggggaggagtgagagaaagaaggatgctggacaatcaatgtttttatttgtgttgatgagacttctgtaagcaaccagcaggagctgatcttgttataggcagatccacattgcataaatcacttagcttactgatcatccaagaagacactattatgtgaacccaacaaaatgggatcttctctgtcagctatcctggagtaagaaaattgcagagacaggcaaggggaagttccaggcagaacagcttgggggtataggtaaaggtctgaaccaagcaaagcaactatagttttaagaatacactccacaaaagcaggaggctttatgattatttccttagtgttaaccctgagacacttgatttacctacagcacttcagaaagccaagggacattttgataatggcacaattttaagtctgatacactaagtaggctattagtccagtgcatgacaggactcttccaaccttggacctagtacttattttctcagaaaagtatgctgtggacttgaactgttataggaagagctgtgttcagcttattgaagcagtgattttcttttttatgttttgcaagcacaataaacagaggtaatgaagcacagatgttttggaacaacacgtaaattgcgggctgctcacaaatgtcattttctcacctgtttgttctagggaaaaaaattaaacatgtagagaatgaaaaaaaaaaaaaaccaaacaacaaacaaataaacgaaacacagaccaatatctcatcgagaattcttcacttaaagttcaatttttgttgtcataattctctttcaatgctggcatcttccagatgctcgggtcaaatgacagtgtaaatgagaaagaagtcactgtgacatttaagatgacaggcataattctgacatgaggaagtcacggggaggaaaaacacaaatgacagcttaacatgatgatcatgccatctaccgtggaattatttgattagatacccaccattttgtgccacgtataattgaatttaagtaattttctgacaaaagaggaaagacgaatgcttggaagtgtcccagaagcccaagcctgacaggtagaggtgcgtctcttcagaggagccatggcttacagaacagtctcagtaacatgttttggaggatttatttggatatgtgacattttcaaaaagaggaaacatggttcctactgtcagtcaactgccgttgctcatccatacacagcatcttttccctcactctgtcctgaaagtcgccttcacttggtggtctaccttgccggtgtccagcaaatgctctaatgggaggatccttcatgtctcatgcactgtttatgaatgttttaaagtgcacattaaataagcacatttttaattgtcaaaaataaaatgggtgactcagaactagctagtacatttttagcaaatatgttaatggcaatacctttgtgcctacttttccaaatagttacaaggggagaatatttttataatttttttctggacatatgcttttagtggaagctccagagtgaagaatgactgaaacaactgtcattgaataacacctttaatctttactgcatgtgtctccagaaattcaaatgcgccattgaatggcacaccacattattttatgtatgtgacatctaatgatattttgtcaggttttaaaattaaaactatttttttctgaagcatgaaagttgttcatcacaactgttaacatacaccagattttaaagatagtttcctaggataagctgcataaataactttgagagtagccttttttgtttgttggttttgttttgtttcaattttcttttatttttgaggctatgattacatcattttatccttgattttcctccctccttaaatgacaaatttatggtcttttttttcattagttgttgatatatataacctaaatataaacctgctttgtctgtataatattgtttgtatgtatgctttcagggctgaccatttggcactagacaaacaatggctatagttggattttagagatcttaagttagtcactcatattttaaaatgaaacggcaatacctggtacaaaaccatgttcaaagggagaagtagagagggatccactagagagtcatggcccctatgccatctttacaggtggtctcctagatagagattctttctaatctttatcctgatgtgagtgaagctcttcagagagccacatttcaaacctttgccctgtagacaagtctgtttctaaggagacactgggtaagaagtgtgggcagtcactattcactttagtttagtgtttcatttccctccacgttcatgacccgtcctcttctgtgtgtttcataccttccaatattccagaaactcatagtttcactagaggctacatatctcttctctgctttactataaaaaccaaaaccttgatgagtactatatagatgagaatagtgagactcaggtttgtatatcacaaacccaagctagtcttcaagtttggggccctgcctcactgtagtattctgtcctacaggggagcctttattgtccctcaacacttcacactgtgggctttgctttcacttctgtcctgcaacaccatctatgtgtttgtctcctcatcctactcaatatctttgttctgaacctgaaggaatttacatttagtcctgaacatctttcttatacgtttccacatagttttcatttttgtctatacgtgaatttacccaggcgttcaaattgcactactccgggggcttgaaggagacagacggagatagaaaggctgttctatttgatgataaagaagaaacgtggtgcctttgaagagctaagtcaaccagggctactccagtcattttgaagaatgcttaaaagcctgctttagagaatgacacaaagggacttcagaagcactgaacagaggtggcacctatctctcttatccacagggttttgagggtaaaagttcagacaaaggatgcagtcaccttttaaaatgtaaatgaactgcagcatcagcataatttcaatgtattctcatcgaaaacaataaaaatacacccacggggtttttttttttctttattctctcaaaaaggatcttgaaaacctgtaattatagaatttactgaggaaaaattactaataaatactgcaggagaaaatattcaaaggtctaaagattgccagccaaaatatcttatttccagactgcatcttggaaggaactaaagaatttacagaccaagataaagacaagttagaaatcaagtgtattgtgagtaatggagagtaagtcctgacaaattattgacatggagaaagataaccatgtcctaaaatgacactttgatactctgactctgtgtgtgtgtgtgtgtgtggggggggtgctgttgttgtacatagttggttggtagagaaattttggtatgtaataaagagcctacataaatcccttacaggctagtcactatgaaggtgagttagaagagacaacacactgatgatcttcaaagagaatactctggtagaaaaggcatattcaaacaaagagataacacagaagaatagacattcattgccaactaagtcatgcagacagtaaataccaccctatctcagaagtgacagaaaaaaacaatcacaggaaggcagagattggagccttcacaaagagcagaatctgccatagaccacaaaatatctcaacattattcaaaatagataatctgttttgtcacttatgaagaaacttgtcagcctctccccacttcaccattctcgctaaataaggtttccttccttccttccttcnnnnnnnnnnnnnnnnnnnnnnnnnnnnnnnnnnnnnnnnnnnnnnnnnnnnnnnnnnnnnnnnnnnnnnnnnnnnnnnnnnnnnnnnnnnnnnnnnnnnnnnnnnnnnnnnnnnnnnnnnnnnnnnnnnnnnnnnnnnnnnnnnnnnnnnnnnnnnnnnnnnnnnnnnnnnnnnnnnnnnnnnnnnnnnnnnnnnnnnnnnnnnnnnnnnnnnnnnnnnnnnnnnnnnnnnnnnnnnnnnnnnnnnnnnnnnnnnnnnnnnnnnnnnnnnnnnnnnnnnnnnnnnnnnnnnnnnnnnnnnnnnnnnnnnnnnnnnnnnnnnnnnnnnnnnnnnnnnnnnnnnnnnnnnnnnnnnnnnnnnnnnnnnnnnnnnnnnnnnnnnnnnnnnnnnnnnnnnnnnnnnnnnnnnnnnnnnnnnnnnnnnnnnnnnnnnnnnnnnnntcacacggcccccaatggaggagctagagaaagtacccaaggagctaaagggatctgcaaccctgtaggtggaacaacattatgaactaaccagtaccccggagctcttgactctagctgcatatgtatcaaaagatggcctagtcagccatcactggaaagagaggcccattggacaggcaaacatggatgctttgtaggaaatatttcaggtgttaccgagttctccatggccagattagagctatcccccctgtggtactgagtcttcattgggaagatctgagcacagtaaacttctataatgcttcaaggttgttcctgggcactgtaaaacctatcacactctgagatctcatctagtgagatgccaatatgagtatgtataatacaccttttctctattttgaataccagttggcctttctgctgtttttttttgcagctagaaggctcctaaaatagcagtgggaatgtcaaacatgctctattcctaccaaagggcatcatattcatttaggccatcatatgttatttagcttattattaagagcaacaatttcttgatgcttaagcaggcatgtggtagtgatgcaagaagcagggagagcagtgacaggagctgatcagcagtgacaggccagatgtttatactatcttctttctgatttgaacatgtcacaccaagatttgtcttctgagagtacaaaaatgagttctcaagtcctctactgcatgataggaaagaactcctaattatagcattccaaatgacaagttctctatgttgtcagtcttgtctttaatgagtctatgaaaaactcaatcaagatttttggaagcagtgttcttgtgttgagagtggcattgcagtagtagacttggcagaattatgcattaagttgcatgaagtaatatcttaaaacactgaaaagtattctagcttataattctttcagaaatagccaaccaaggaatgatattcttgttctaatttttaaaaaggtactttctccccctgggagttccctgagactaagccaccaaccaaagagcatacagaggttgatcccagcccccaggcagcacatacatagcagagggctgccttgtctggcctcagtgagaaagaacgcacccaatcctgtaaaaatatagtgggacatcatgcgtacatgtgtacacacacacacacacacacacacacacacacacacacacacatacactcacacacacaaaggaagatgtgaaagagaaattaatgaattgatgaattatgtaaagacttgatgctccccttggggaaaccctctcagaggtgaaagaatgggggtgaggaaagaactctacagtgggaggacgatgatgggggcagcatttgggatttaaataaacaaaataattaattaatcagagagagagaaatatctcctcccatataattttccatttagatacccctatcctgattttaggtaccccaggcattcctcatttccctgcactctatttcctgatattgacatgtcaagtgcaacatttggaagagcctgtatcagcatgccgccatcctcattagtcttactcatccccaggaaactactgaaacaaaacatgtgaggatctacaacctttgcagatagaaaactgtcacggataaaactagcactgttagcaggctaatttatctggaatttaacacagacgctgtaatattacaaagtcccttgacattttcagtaaaaaacaactcaaaccctgttttaattctactttcgtttcttttgccacgaaacttttatataagtttctgcaatgaatctgctgtattgggctcaatgcaagggtcagcagactctgtccatattcctgttatcacaaggaagtttcttgtacttacacatgtggaattccttttagggaatagagtctttgtaaaaagactctagaatctctttttataattatcattgaaattcctaaccatatcatgtaccagttgaattagcatcctaggttctataactactgcaaaatatacatctaaccaaacagttcctcatgcattagttatagccccactttgtttctgtttagtgaaagtagtgaagaaaaaggcacactgacactctcaatgttctaaaatgcgaagcaatgcgtttcttaaattctgaaacagcgattactttttccatgctgtattcctattaaaagccgaggatcagagccaaggattcaatagtaattgcaattataaagtcctggtggagatcattgaaagcataagaacataatgcttggggggagggggatgactgagactgtttttaagctagagactcattttgtggaatgtcagtaaggttaaagattcagaatgggtaatatatgaacttagtacttttagctaaattccctcctatctaaaaggacaagtggaagcttcctcttgttatgttatctgcatgtgacatgtgccttcacatcaaatgacctttttttgaggtgcaggcttgtgagagaatccacatatgtgttaacaaaaatgaagtgtgctatttttatgggaagtccatcctaatacagcaggacatgtgtttaatctagtcatgtgatgctagcttctcttgttgattatagatttatgtaacctaggattgttttagctgaataatagtaagtgaatttcatatgtggaatgtggacacacttctaatcatctatacctgcaaattataccttcaatttcgatgtatacaaacagcatacagactcaataataatatattaaaagtgtgcctcatactgttctcaaatatgaaggaaatttgcttacaggtcattggagatgtagaggctcacaaaagcattttgatgggtacattatttatgaatgactttggatttcactttgcttgtgggcaggtctctactgaaagtccctatgaatgctttatcagataagtttggaattcagctttggggtgggaagactgaaaaaaaaaacaataatttggcatttgatggagtgctggttccttctaatgactgactttgtgaatttacttatgcatggatgtgtcaaaagatattcaaagtttcctgtgaacaggcagtatttcttgaaaaaaagtgcgtatcataaaactagaatttccatgtcattttattcagtatttatttgctaaggcttcatttctgtgattgacttgctgatctatctattagcctgacacgcccttatactttccaacttggctattggaatgaaagtgacgaacatttctgctgttctcttaattcctggggcttggttcaattagtagaactaaataatagaattgaggcagaaaagaataccaaaatgtcctttcaatcatgatgtcacttctcagcctgaagctaatgagaaaggaatagaaactattaaaactattagtaatagagcttttagataagtcagatcttatcaaaaaatttccatctattgttgtttgtgtcagaggatgagcatgtctgtatgttgtttgtacaatatgatctatgggtgcagggattataatttttctgtattgagaataagttttgatccctcctccttctcctcctcctcccctgttttcccccctccccctcttccttcttcttgtgtggatacattaggattcttcttcctctaactgcatgctgcttttagctggatatagtatcttgtttttctccactgtgcttgtcttacatttatttgttctcattgcttgccttgcttgggaagaaatgatgctcagccgttcagaaatggcagagggaaagagcacagcttcatttccccagggagcatttgtaagggtgagaactgctcccaatctacaagtcatgttttacaccatgttttctatttaactaattggttatgacaggtgtcagcctagctctggagtacaggttgtcctgatgctaagacacaggcatagtgagcattgtagtgttgatgacattgaaaagtgagcatgcctattttttctcattgattttctttttagtatatgatatcagttaatgaatgaaatccatttactgtataaatgcatgcagccattatgactgaattcccattgggttttaacctacaagcataaccacttacttgatttacttccaaaagaaaagtaaaagtgatgttcatattatatgtagatgtaggcaaacaatacgcatacactgaaattcatattatatgtgtgtgtgtgctgcttgacctttaagctgtgatctaaatcaatctctctctctctctctctctctctctctctctctctctctctctctctctctcgcatcaaaaaactacaagtccctgatgagcatgagtcttcctcacatataatcttggtgaaatgaaagttttggaatttggaacacagattttcaggattcactagacagaaaggtgtatctctgttaagaaattctgaaagaggacaattatgtgtgtgtgtgtgtgtgtgtgtgtgtgagtgtgtgtgtaaagtccctacaacataaagcgccatgtgtatataagaacagagaaggcgcagaatgcactattgtaaactgtaagtcgagtttattatacaataagtagtttctcctatccaagtggtaaacagaccccactttgccttccaaggtcagacaagaaaactcacattcaggatgactgtcaaaaagttggagagtctttcattctaataattttattgtttggccatttcatacacatttgtcatttagtagatatcattattgcttgccctttattacctactcatcctcctttttaaacatttctttccaacaagccccccgccttacttttatgaattatttttgggtagggaccaagtgagttcaattagaattgctggtacaaacttaagtggggggttattaattagagaaaaggcagatgatctgtggctatgccactgaagaaaaaccactaactgccagtactaaaggaggagcttactaaggactcaggttcacaaggtaattagagcacctgtattatgctctgagtggaaagtaagcttcggtccaacctgtatggttcagcatgctaataaaactttctaagcagcagaaaccaaacctgtgataagcagaagcaaatctcagaccaactgctgttaggtggcagaaaggatggaatagaaaattccaagagggatactatgtggatgatagagctactgaagggattatacatctaccagaatttctcacatcatatatttctaatgtgtatagtttgcagagcagaaatacctgtatataaacaatataattcaagtctcagcatttgaacaaaatttagtttcccacactactagtgtttaccaattctcacttacaatatggctcaggatatatgcccaaaataaatggagttgataatattcatgaaatctactgaataaccaagctctgaatgactgttctaaagacaaccaagtttgccctcgtaaagttctcaatgacctccagtctcctaggaacagtgtgacacacacacacacacacacacacacacacacacatatatatatatatatatatatatatatatatatatatatatatgtatgtatgtatatatatatatatttatacacacacatacacatatacatatatacatatgtatacatatacacatatctatacatatatatgtgacacacacatatatgcatatatatatatacatatatacacatacatacacacacacatatatatatataatatatatatatatatatatatatatgcggcagatcactatataaccactcacttgattatttcacacaatacatatcttcactctcagatgtgtgagccaaactttgcagagttctgtgcttcatggcctcactgggattaaatccaggtgaacattaaagttgaaggctcatcatcatctaaaaaggaaacatctactttctatttcacctgtgtagacaggatccactgcatgtggatccactgcatgtgtcagtaagtcagaaacatcgactttcttgcagattattccctgacatcagagctcacttccaggttacctagtcacagagtgaccattccattgtcatttccatattgtgcatcttcaacagataatgggtgtaattttgtgcctttttccttactgcatattcagccctgctcagatgaaatgaggtctctctggccactttagggaatatccaccacaactgtttcatgatatactgtgaaacacatgattctatgatgatatcttcacaaagaaacagtctagtagacatatgaaaacatatctataaacaattaaaaagtagagcatagtaacagaagcttggacaaatagggaaaatagtattttaaaaacaaacgtgcttgattggcatatacttggtttttaggtaaaatctcagcttcataacaactcttcagtcagtttgtcagttcccagtggaccaggctatgaaagagttaacccacctctctataatcttgtcactttccatcctcttcatcaggaaaataagacctgtaatttgcaaaatgaatccacgttcttgaacagtagctgaatcgtaaacctgagtattttaataattagcttttcaaattatcttatggctgcgtactgttcataacagcatagatcataatattcgctacagatgtcagacccctccacttttgctgaagaaatggtgttaatgaattactgtagcctgatttctgacataattgccaggattgtacaatatatcattctacatttatgccagcaaattagcatcggtgatttataccatactggcttccttaattctatcatcccctaaatacatggtgttcaggttttcaaaataacaggtggctctataccttctagaatcaggacaatttacaatcctgccactgaattagtgaatatttcatagatgacactaacgatatgcctgtgggtttacagcaaagtaagactgccactctgacaagctactaaatactgcaaatgtatccataatttcaacctgagaaatatgacttttaataattctagctctctttctttctgcctaatgtattttttcgtgacaactctctaacactaagcacttaatattcattttctaatatgaggtggacagctgcagaaacattcaataaattgttcataataccccatgtacttatatgatctacacagtgtaccaatgtgcccaagggcgcagatctgtggatgatttctgtgtctttgaggacttgagtgcatgtctgagttacccacaccctcggaaaatacaaatttacaataaaacatatttactgttcacagactgactcccgaagtgcctaatgcatagggatgactcaactaaaccgtggtgacataactgctttgtgttggccaatgaccatgtcttcttttctaacctgcactgttcccaatgagttagtatctcacctgggaaaacagtagagtgtactgtatctatccaagttcccctaggctttttattcagctccatttatgttaatcaaaagaggaattcatagttcttttatttgtgccaaactggggaaatagatatagagaaaaaaactgaagtatttgccatgaccagtcactggtgaaagcagagccagaagttcaacttttgttctaagttcaagggaggcttcagagtcctttatcttctacacatctatgcttcttgtcaatcacatactgtacatcaattgctttcagttgatgcttagaattttcccaggttctggcaactgctgttaacatcaacatctataggcagagctgagaaacagagagctgaagttattgctttgaggatacctgatacatctgtgtaaagtcattggaccctgtatgatgtatttgagtacagcaatgtgctgggctcttatcccctctgtgccctgtctttatcctctgggttaaacatgtattcgttttgatcatcatctgctcactgacttagtcttttgtccctgctgaaggaaaacagtctgtgctgagaagtgcattaggttcatttgtctcatgatgatagtgactagaggttccaagctgcattgtgttcaggcttccgtccctgctgtgccacaacgcaatgggcggggaaaagcaaagaagaagttgtggttccaactctgtgttctggagcagccatactccgtagagtggctttgcttatagaaatgagctctcctgagaactagtgggctcagagaatattgagtgacattaattcattctgggatggaggccccacaacctagttctctcccagcagggttatctcttaatggttcgacaacattaagaccattacagtgagcacgagatttcagcacacaaggctttagaagacacgggtatctgaaccttggcatttaggcaactgcttctttaacttctaatctgcatatctaattcaatctagaggatgaaaaaaaaaagagggtgtgacagaccaggataggggtctgccttgattatacctcaatttcctacaaaagtgctttatgtgcagaaggcatttaatattaatattttcaatagataagtcatcaaatgtttagatgaatgcaagtattgatgtacttgtctaaaggaagcttttattctgagacgagaaaacttaatcatatgagtaaaggagtttgcatcggttgtatgcgacttactctttgaagagtctttctataaataaaattattccaatctgcttgaaacagatttgctgagttttaaaatatgtattagaaaaccatatgttataatccaaattaaaaagcgtttatccacatatctcagtctttactcagattaatttggtagaggtgaaaatgaattctttcacagaaagtagcttgccatattctagagtgatgctcccatatggaaaacatcattatgaacagaaactgagaatcagaatagatggtagatatctagaactattggaagggacttcctctttatttctctgttatacaggagattaagccctgggcctacctttgctctataagacctctaccatcaaactgtatctccagccatcgttaggcttttattttgaatcagagattcactaaatatctcaggctctacctgaaggctttcagcttgaagccctatcaatatcttaaatgagtggttctcaatatatgactcatttgtgggtctcatatgcaatatcctatatatcagatatttacattacagttcaaaacagtagcaaacttacagttaagaagaagcaacaaaataattttatggttgggggtcaccacaacataataaactgatttaaagagttccaacattaggaaagttgagaactacaatcttaaataaacaccaaatacccaccaaatttacagaatttcatttctttcagaacttcattaacatactgaggctgtaagacaggatttggcggtttggttttcttcccgttatcaccatgaaagctctaaagcatatttgtagttaaaaactggaccactaggttttctttataaaacaaaatgaaaagagagaagtaggtgtttatattgaaaaatactaactaaaacaataaaaaaaatgaaaatggaattttacataaaggctactatatactagaggtgacataagagactgtcactctgggatatgtggtctttggccccagaaagagaatttaaataagatatataaaaaccagaagactcagtaagtaaccattgattcattccgtgagtcttttgtaccgcaaggatcccctcagaacttagaaggttttatgtagaatatattacacagcacataaaacatccagagaaaaaatgttaagggtcttcactaatgaattatttgtgtaagttataaaacttttaatccacattcccaaatttgcaatgggtgcgaagaggagcaatggacctctttatacagcttgaacctggtaggcttctttccaatcagattcttccactgttgacgtactcgtccttccttcaaacatggttatcagaaagccaagtgatggtcaaagtccctagtggttttgttttctgttttccaatacaggaaatggtaaatcatgcaacaataggtggcttattcattccctaatataatttccactgtatctgatttagtgtacacagagagcgaaattcataattatttatggcaactcttaaacggcagagataggaaagagttctgaaagcaaaagaagttagacagaatgttcttcacagactatacaggatcataaatagccacatgaaagcaatatcatgttatctgaaaatttgagccagcagtatcgtctacttattggattaactgcctagaaagcataaggcattgagttcaatgtccaagtatacaaaacaaacaaacaaacattctcccagtttagctgaccataatggtatatgcctacaactgcagcacactggaagcacagacaagaggatccagaacttatatagggaggtattacagttcaacatccagatgagacactccctcaaaacaacaacaattattagccagaactagatcattctagttcacatttttttcttcttttaatgcattagcaatgaagaatgagttgtgacacatgaaaatttaaatttggaaacactattttaactgtcttgattttatggatttgctggctagtgtttccatctgagtcattgaaataggaatcgatctttctacactctttgttcttggttttctagattccttgagcgatttctcctgccttcatttctgcctttgttctcacaaatgtgtgtttagatgaataaaattactcacctttaattacggtttattgcggcaaataatataaccttcttttgtcttctgttctttataagatttccagtctttctccggaaaggctgtagactatccaaccacctaagattaaaccatagtgttgattcctcatcacagtattccatctctgccagccattcttacaatgtctacatgctctggaatccacatgcaaacttaaacacagaactgatttactatgcagcctttcttattttttgttttttactcacaacttaagccaaaaatatgtaaaacagggatctagatggaatccagcaccttattcattaggatgaaaaacagagtaggcacaaagccagactaatgtcaagtgaaataagagcctcatcctgaatccaggatgcatggagggatgacactcctcagcctgatggtgtagctcccttgctttatctcttaggtttgcatttggaagcaggatgctacttcctctccaggtctctgggatgtatctgttccctttagtaggtagatggtctagctggagtccagaaataacactgtaactgtatggatttttcaattgtatttgtttcatttctacttttcacacaagatgaaatgctacactgctaatggctgagcattttctgcaccttcaaagttagtcttgtgcgtttaaatgtaaaacacagccactagcattagggcagatattcagctacctccaaaatggcagaattttcctttatcctcacataatagaagccctttagacttacaggatagttttaatatgacaacttttgtataggtagcccctgatgtttctctattgtcatcatctcacatcaccactgattcctgttaaaattgagaactcaatcttaattgaatctggatgtcttagttggggtttcactgctgtgaagagacaccatgaccaagacaactcttataaaggacagtttctaattgggtctggcttacaggttccgaggttcagtccattattatcaagacaggagcatgacagtgtccacaaaggcacagcactggaggagctaagggttctacattttgttgagaaggcagttaagagaagactgacttccaggcagctaggaggaggatcttaaagccaatactcatagtgtcatacttcttccagcaaggcaacacctactccaacaaggccacatctccaattagtggaacttcctgggctaagcatattcaaaccaccacattggacatggtgttctgtgcctataatttctgtgctctagagactgaggcagaagtgtcaaaatcccagttcatcttatggtatatagtgagttccatgacaaatggactacagtttgagaccttgtctaaaagacagacagacagacacacacacacacacataccacgcacacacatgcacacacagaaagagagagaaagaaagaaagggagggagagagagaagagaagggaagggaggggagggaagnnnnnnnnnnnnnnnnnnnnnnnnnnnnnnnnnnnnnnnnnnnnnnnnnnnnnnnnnnnnnnnnnnnnnnnnnnnnnnnnnnnnnnnnnnnnnnnnnnnnnnnnnnnnnnnnnnnnnnnnnnnnnnnnnnnnnnnnnnnnnnnnnnnnnnnnnnnnnnnnnnnnnnnnnnnnnnnnnnnnnnnnnnnnnnnnnnnnnnnnnnnnnnnnnnnnnnnnnnnnnnnnnnnnnnnnnnnnnnnnnnnnnnnnnnnnnnnnnnnnnnnnnnnnnnnnnnnnnnnnnnnnnnnnnnnnnnnnnnnnnnnnnnnnnnnnnnnnnnnnnnnnnnnnnnnnnnnnnnnnnnnnnnnnnnnnnnnnnnnnnnnnnnnnnnnnnnnnnnnnnnnnnnnnnnnnnnnnnnnnnnnnnnnnnnnnnnnnnnnnnnnnnnnnnnnnnnnnnnnnnnnnnnnnnnnnnnnnnnnnnnnnnnnnnnnnntcacaagattgaagccaacatggaatgtgaagaatttatggatctccataatcccttgaggatttacacaaagggaaactttagtatgggagggagagacattttcagctgatgtagccattggtagaaatctgcatgcttctgtcagaaacccctcctcacccactcccatgctactgtgaaatctgaagaaaatgtattaactctttgtcatatacagaagaaagataaagttttaacaggagtgagatggggaagaaaacagggtagcaataggtataagcacactgcagatgtatgaaaatataccaatgtacttcctatctatacttcatatatactaatatacatttaaataaaaagttttaaaactctttaattggaaggatatacttgtttattgatattacttttatttccatttaatttgctccagagatttcaaagtttatggaggagtatcatagggttgataataagcacaaggcacccagaggcttcttgggtctccatggtctgctgcaccattgccttctgggcatgctctgctgactcatgtacccagcaccattccatccaacataaacacagagttcagtcagcctgccctcctgagtgagtcccggagaaagtgaaaaacatccccatttccaactcgagcttcaccacactcttaaataaattattttaaacttaaacgaaaacctcttggctaagatggggatgttccattagcagaattctctgagctatcaaatgtgattgaagcatttcttttctttttagtttcttagaatactaaaatggtaaaagtggttcttaaaggtatttatttagagtgctacaaggtagtgggtaagctttgggctcttattgcttaaatttcactgtcttccattgacttttaaaagaactttcttggtatttctagttgtttaacatagtacagtttctagaactaataccctctcttccttttttccttcaaatttccttcacttttttcttttttccttccatcattccttcattctttcctttcttcttttgtgtctgcctgtctgtctttttagttaataacactcagtaccctgaattttgctttaatactgtcttattctcccccacccaccaaaatagtaagtatctgagaatattgtttctcagcgatagccatgctgctatgtcttctgttaaatgtttagatgttcatcatggacagagaacaggatcacaaggcagctggtcacaaaacaccatatggctggataagatgctggatgaaaaaatacacatgagggaggggaggggacctgtcacggcttgtcagtctttatccccagagaagctctgatgacagagggttgttgaaatggcgcattcagggtcactgggcattgaaaaggataaacagtgacttgaaattcaatacaaactctcaagggaaagagtggacatggaaggtgctaggggttttgtgaagcttggctaccttgtgcctgaggaaagatgacagcaaaagacattgataagagatgattaaggatatcttcagaaaaccataaatagtggcagatggaaagagtgtagagaaaaaccgtttctaaaataatctcttacagaaacagacatgtgtgatgataatatggacaaatgaaatattagagatgtgattttttttttgcttcgcaacctgataaatgaaagagaaaagcatatggagataactaagtactgtgcttttatatggcagaacccttgtctataatgcatttacctattacattgaggtcaacttattcttgcagtgtttcaatactgttcttcggtttcatatgagccattgttccactagaagcaggcttcttaaatataaggagaagtggggatagcaatagccattagttgaatacacatagtattgtagcttctttaggtagtatgctgtgttcaaaaaaaaaattcaaaatcatttctcagtcaccacttaccaaacatagattaaaatttatatgtgccaagtaatgatcagagaaaagaaacactggcctgaggcacagcagtacaggaaagatccagctgttatagtttgtcattgaagttggcttgacaaaagcacatgtgaacacacaaacacacacacacacacacacacacacctttgacaacctattcacgcttgtagagattttttttgttgcaccttgagtaaactgttcaaaaaacattcttcctagataagcaccttggaaatataagaattattaaatgcatatccatgtatttctaggcctaaaatgcatagaactgagaaaaagaaaaagaaaaacaaaagaatcatatacgagtgtgccagttaatcgatcctcatttcctttctcattttacgtaatataaattcaaattttaacagtgtagctattgttgtggatttgacaattcttccctggtttgttaccagcttatccctctttatgatcacaggggctctttttttttttaggatcagagtttctcctggaagtgtcctttgcagaacagtcctaagattaggactacatacctgtatcaacactcaggtcattttccggatttacagatcaaccctagacacgttctccagctccttttgtgccttttcatgaaagtattttatcctttagaaaatatggccatataatgatgcttttgaagtggcatggagtatatcatcacttttcagagcaggttgaaatatatcttacattgtccatttgattgaaaaatagtcattctcactataagcctgcattttcttagtgatttctcttgattcagtgtttggattggatttttagtttgttttcataataatggtgattggcataaacagcttgaaataaaacttgggtttcccactgcagtgtgtacattctcgaatgctggcttaatgaaatctaaataaagtcaaattatatcacaaatgggcagagtctttcactagtgcaacttccaataatatactggaagtctagaaaatcacgagtaattaatgtacactgaatatgtatgttgaaaatttggatgataaaagtggtaaatgaacaaagtagactacttcatcatatgttataatttgacatagggtatcaaataaaataaaataataattaaacgtaaatatcattacagtacagggtatgtttaaataaatcttcatctcatgatagtcctgtgaaaacccaaaaaagagaaacctgaaaaatcaatagatgatggagaaacatacaacctaaatccagaaggaagtaaaaaagtcaaaccaataaagtataagaaggatttctgtctcaggttacactatataaaacatcatatggggacctgtggaactaagcaaaatcagaacgaattactgagtatcaaattatcttttacctgcatgatgtaattcaatagctgtttaattgagcaggaagcctcatttctgctgaataagtccaccctttctggtattttttgactgtttaatattattttgttaagtatggtcattcattgttaattgaacagacctaaaccaagcagagcatgttaggtcacacttgtaatcctagagctagggaggctgagagagaaggattattatcttgaggctagcctgagctacaaaggaaatttcaggccaacctaagttatacaatcagaccctggctcatttgactcagctgttctggctctaactcttctccaagctgactgattcaaactggcttctcactgaattgctctgtttggcctcaaactaactctggcagtttgctctaatcttctggctccttctcattctctagatcattctggcttcaactgcaacctccctcttcctnnnnnnnnnnnnnnnnnnnnnnnnnnnnnnnnnnnnnnnnnnnnnnnnnnnnnnnnnnnnnnnnnnnnnnnnnnnnnncctccccctctcttctgctgtcctctattttctgctattctcttacatttgctctctttcctttatgttcagggaaagttgggagtatcctatccctgaatcactctatcaagtcttactctaattcaccattttttcttcccctcaattaaacaccaatttcaaacatggttgcctcctcctataaacactttttaccttccttggttgagattaaagactttattgagattaaagattaaagaaaaaaattgaagactaagggtatgtctgtgtttcagtcagaaagcttaaaggtgtgtcatttaagctgaatctcacagacacagatctttggatgtgataccttgccagaccaatgatgttactggattaaaatccctctacactgaaaataagcacaaagacagaatctgtagataaggcccctgtagatacctcaagtctagttcccagatatttggagtatcttcagattgcttatagaattacactgtctagaagaattcaagcagggctgatgcaaacagtatagtgtagaggtaaaaaggagattataggtccttatgtgtgatatgttgccacagaattacctggtaacttttcttctttagtctttgaagaaataatgataagcctttaacatagtagttttcacataggattcttcaatgaatatcgaatgggctaataataggtgattttacaaattaaattcattataaccaaagaaattttacatacagcctagtcaaatctacagaactgttttttcataagcataaactatatacacttttagggagataatacaaaatattgggagaaaatgtacttatatatatgcccaaatgtctatcagaaaatttggaatagaaataacttgtaagaaagtaatcatacctcttaatgtcttaaaattacatattatatgtcccccaaatattgtattgccctttgataaaaatccacatctgaaaatagtttctcaaatatacaaaataagataactattgtcaaaatttggagaagacctcctggtctatttcagttctacattagcacatctataggtgtcttcagtcagatcatgtgtaggcagtcattttttgaggcatcatgcaatagcgtctgcaattttcacaagacaatctcacagcaaactttctgactctctggctcttctcttctacaatgttccttgaacactaagtgcaggatttatacaaaaaaaaaaaaactacaggaagctaatgctgagagtgggagacattaagagcatatctactgtttgtctaacaccagatggtcagcccaaaacatgcaaatagttatttaatacagatgaaggaggttgtatttatgtatttagaaatagatagacaggtgatagctaagatagatagatagatagatagatagatagatagatagatagaagtttctaacaatacatagaaaaaaaccatgaatttaagaaagcaagaaggtttataggggatggaaagaagaaaaagaaggagaaaaattatgtaattatagtataattgcaaagcttacttttaaaaacagatgtggagaaacagtactgaatgaaaaaaaagttaatgtggccattatcctcaaaaataccactgctatttgatacacctatcgcactacctggtgtcaccaaaggaaagtaaataagtatatcaaaatgatacctgtacttctcaattgttaaagcatatcactcacaagagccatggcttgtaatgaactgtggtagatcctgataggtaaatgaataaagaaatgtgttatctattcaaaatgtatcactgtaagaaactggatgtggacacttgctttattgtagaatgactgcaacaggttagcttaagtaaaatagcccagtggtgaaaaattatacatatataggcttaaattaagatgcccttgtaattaattccataggtcagaggagaaatcttacatgtttactacacagaagtgaggacctgagcttgaagctctagcaaccatgtaaatccaggcatgaaagcaagtatcagtgttcctagtcctaggcagtcagggtcaagaagaaacctgggagtagctgcatagacactagagccaaattggttagctttgtctagtgaatgaccttatctcaaaaaataaggtgaaaacaccagaagacatctgacttttgacttctcttcgtgatgggcatatattttagtgtgtgtccatgactgaatatttgtgtagggttctgcagcatcaatagacacacaccaagttttgaaaattacaaaaatataaaaatggagaaaaggtagtgatttatagggtagcgaaggattaaaaggagagacacggtagagatggaagaaatgacatgagccattcacaagagaatgaatgttaatgttcagcagcacgtgtctgtaattcacaagtgtttaatgtgtgccttatgatgcactagaaaagatgagtttgaagcttcccagaacaacaatttgaacaatgttaaaggaaatggaaatgttgactgttgtgatgtgcctttagatgttttctacataggtttggttgtcacactgggtccctcactgaacaaagaacacagcagttgactagactactctgttgagcaaaaagccccaaggagtcacatgcttctgacagtactcagacaatatagcctcaccaagacttataagtgggtgctggaaatgcaggcttcccccatgtttacacagcagttgctttacccaaggagccattacctcagcaacatgattaatatttaatgagatattaggaagcacattgacttttacctcactcgttgaaaaggaacattatttaagccactatttttaaaaacccacgtgtctttctttctttctttctttcttttcaaagttcctaatgggctatataaaatgccacatttctttgaactctggaaacaggttagaaagctaatcatgttttccaagttttgaaatcacacacacaaacttcttttgtgtacaaatttaggaaacttctttatgagcgttgaacacttcggttttatttatttcctcagttaaacaaaacatgctagggtctgttgtcaaactaacagcagaaaaaaaaaaatcatccaaaagtttttcttacagcaatggaatctccctcttacatcactaaaaataaccgcatgtatttatattttatatattttactttttatgtattatgtgactcaatagctagtgaaacaattagttcattggtagatataattatcatatacagttaatgacatgaaaatgacacagcagcaattaatctgaatgcttgaagtacaacataaatatctttgattttaggaattcattttatcttttctttctcttgaacaagatgaaagtagtatgctaataatgtgctaagaacaaaataaaatgtctccaaacactaagtattaaatctgtcaatgaactatacacctggaacctgaaaagactgtggttttatagaaaatttaactccatagcatactaatgttttggacataaaaatcttatttttttatattaaaaacatttttttttaatttgcaattaacttcggaaatcatcctcaacactttcacttttctaatcttttttttaagtgttcctaaaagagaaagactatgttgttagagtatggcaaattcacttcttcctctctatgacaacagataaagaaactgtaaccatggaaacagtaatgggccagagagattagggccagacaagagattaggcctctcagagcagtgaaagggttctgattggttccttattaagaccttatttgaagagaagttacagaaagcacgggggattagcatgggcagaaataattcccctatataatgcaagaaactatttctttgtgtttgttttgttttgttttgtttttttatattcttttcatatgacagctctttaaacagagggggaaaaacttcctgggaatcctgctgttctcagttttgtctgtaccatctaaggctgaaccagctgactaaactccagaagcccaggcaagggagaaaagaacatctccctgtgtgcacattcccactgcactcctcactggcaagcccagcacgagaggaaattcaacttaattgatgataatgtcatggggaagtgagttgtcttggaaggaaaaggatttgagctacactcatagtattttgaaatatatatgtatatgtgtgtgtgtgtgtgtgtgtgtgtgtgtgtataaatataaaataattaaaatgtgtacataaaatataatatataattatattaattaagaaaaatatatgttatatataggcttcttggaaatgttcacgaaatttttttaacctattattaatcacatttgaaaagacttattagaaagcatctcctaagaaataagtgtgcccctaaaattgataaatggagtgatgctgtgttctaagttgtgtgctatgatcgcagacagattttctgagaagagatcattagttaactatgaagttcttagtttaatgaaatttaagatcaattatacgggtagttttaagtggaaagcggtttttccaaattggattttgaggagacactgcttgtatatgctaagtcatttctctgctggtaaaatgacacaattcaaaccagattagattatagtaaatgcaggttcattgggaaatggtcccaaggactgaggccagaagagggccatgggaagggagagagacagggaagagtaaggcaaatagagaaggaaaagaagagaagagaagagaagagaagagaggagaggagagagagagagagagagagagagagagagagagagagagagagagagagagattgaacaaaaacgtatggattatataggaaagagcctcttgggagaagggcaaccagcccaagaactggaaagttcctggtttggggcagcttatgctaggtagggactgatggatgctgggagaacctagagtccaggtctgctttggtatgtaaagtatgctcctcagttccttgtccttgggtctgaaaacaaacagcataccctgactgacagtaagcaagagtgtggtggctaactgtccttagacattgaatcctttttatctgttctactaggcaggcttgctttgttcttaggttttattttaacacatatttcttgattatttgtcagactcaaacctacttttgaatagaattacttattatttacttttagaccattcttattatgaaaaaccaactgcttgtttcatgctttacaaacactttggggtgcttttccccaagtggggagggcagaatacacttaacatcaaagccctcagacagtgctatcaactatagaagagtggagactcctggaattgcactgtgcctagcctggggttaaacaggaatagagaggggttactatgggcatcaaaaactcccaggagttcctattgtctccacaagtacaacagaactattggatggccaacctcttcctctctactcctagagccaaggttgcaaacatggatagagatgacgagcattgtctgttgtgtatacacacaagccttgccccaagggcatgtttccatccacaggagcatatgcttaatgtttccattaaacaagcaaaacaaaatgaaacaaaaaacaaaaagaaaaatgtttgccgaaatctccttcaaataaaggcagtgaagaaacagaaagatatgatagcctgtatgtattactttaagaagggttatcacctgggcatatcttatggcaagttatagaatctcccatgggatggtcattgtattttctacaattaatattacctcagtaacatattaattgtcttcatttgctattagagcttcactacggatgccagagtgagcacctgcccttcagcctccattggcatcctatgcgctttgagttggcagcatgcttatgtcggctttactttccaattgatgtccctttttccaaactagaaggtttataggaccctgcaaaatatggcatatgtgtcaaagttgcaaagaacaaattataaagaagagtgtattacaaaaatcatggtatgcatgtaagttaccatgtattatacatgaaagcaagtctctatacgaataaattggatctacttgtttatattgacataaaggtttacatcttggctggttaaatgattctgcagaacactgtgaatcctttttttaaaactatgatctatgatttgattttatagttatgatcattgagagccaccttggaaagaaggtcacactcaggagcagacgcttgaggccatttctgaaattgttgaaattcctgatttcaagccaaaattcatttagtttttgaaggtgaaactcaagtcagaaattcaagcaggaatcaaaaacaataccagcttgaaaaaaaaattcaaaatatactatgttgatagttaaatattgagtgatgacctgcaggaaaatatttatctttgttccctacaattaaactattacaggtgtaagagcagaaaattctgtgtgtgtgtgtgtgtgtgtgtgtgtgtgtgtgtgtgtgtgtgtgtgtgtgtgtgtgtggaaatctatgctgttcttgatatccagtagtctcatgtctgagctgaagtgcttctggtaggtttctttggctctgcatagcatggggccatgaccaggataaagtgtgtgtgctgtccattcagaataaaagggtgccatcaaatccctgcttgcagtctcctcctactgccagaaacacctcagagtcatcacacatttgactttgatttaatttttgacctttcagaaagcattttactctttcctagtattttgccacccctccattcaattaggtgacttcactgcagttaaggtcctacatatgccattccttaagcattccttttctgccctcttatacttacttagcaacctcgttccacactggtgtgtcggtagtttcttccacaacaaagtgtacattcttaagccccattttagtttggtagaggaagtctaaccaaaggcaaattgtaagtatgagccggggagagcaagcagactgtgaaatttgaaatttgccctgggatcaaaagaagatattgaggacaaacaagcagtagagtcatatgaccaagtgtgtatttgtataagcttactcgggatgctgcacagagtatgtgctggaggaaggtgaattacaggaaggtctagttgctaggagatgcttgtgatggatctgatgagcaaggctgtggcattgataaatacttaacattgagcacaacagtgtgtgtctgcacgtgcttcgtccaatgggaaggtcctgaagtcagcaaatatgaaagttggtcctagatgctacactctggcttgctgaggggtatgtatctaaactagatacaactagactaaaggatccaggaggagaaacaagctgagaaaagagagaacttgccttctctgtactgctttaaaatgtctgttaggtggaaatcagggagtttttgtgaatcctccactttgctcttgaaaaagatactgcctatcagatgacagtcgtttctcctcctctcacaaatttgttctaacagacgaactaacttatagccagtttttctgtttattccaaatactctaattctgcggaatttttcttaaatataccaaaagtaaacaaaagatctgtggaggcagaaataacttgaaagcttcctgccgttctgcaaaatctatgcatctttatgtaacggggaaacatttcacatagaaaatgtttctcaaaccactggaaagggaggcacctcctccttctccacacttaaaagggtctcacaggtaaccagtttagttcccagcaggagtacagactcagctgatccctgcataaagtgaaagaaacagagagaactagagaaaatagtctgcaaaagctggctcaaagatggtgtacacattatccattatgatctggatctgtcctctctgagcaagacacaatatttacatgttatgcagattaaaagaccccaaaaattaagtaatcaagaacacagtttaacttaatgaagtgaagattacagatgaaataaacatacaaaaatcaccaaattttatgtattttaacaacattgactgtatattttcctcatatttatagttatttgtattcaatgaactatcttgcttgtattcaaatagaaacaggacttatgaagggaatcactataccaagaccttctttcttaatgccctttatcagctatttctctcctgcagaacattgtctttccattatgccacctcatagacatcagttcccaagaataagccatcaaaaccatgaggtaccttgtaataattaataaataataggcagtacccacatcctcagaatgtgatgttacccaacggtgagaattgtgcatgaaaactcctgaagagaagttgtttctgttgagactggctggctgattagactttcagtaccatggagatctcagaattttacagatccaagagtcaccttttcttgggctagttctcaccatctgcaacagccattccttgccctcttctgtgagtgaactaatatcctgtgagtaatgatatccacgttttcaaatctattaacttagcagacttctagtttccaataatccacaagctaagaacatcattgcataacatcttgagtctacagaagagcttcctcaaacttgctacacgcacttctctgatgttcttgacagtgcattttaaactcatcttgatttttgactttcttttatctgtaaaactatagaagtttgtggagctgctttcacattgaaacatgaaatttgggataacctaaatttatatatcctagacatggtcactcaaaattgctccagaataaactttttattgctttaaaaataattatgtacagacatctgtattgtttgtagtttaaggctagaaatcatctgtcaagatgaaacattttcttgattcaggaagctgaacaatagaaataaacatatccatcaaagatgaattatgcatttactaacagaccataattaggaaaagaatgatgttggaatttgtaagtgactcaaatatatgtaaatccatttttcaactgtaaatgttgcagagtactttctataagcagcagttactaatttcttcaataaattaagggattctctacagtaaagtgcaactgtgtatctttctgtcttaaagaattgtttgtctctactagcagtttactcattgttagtatttttgtcttttttagtagatgttcagttgaaaactacacattaatagtattatatttaattgaaaagtagctatgtatacatatgaagggtccccaacagatatacagcagaggactgcctggtctgggttcagtcagagaaaatgtcagagaagatggacgcttaagagactggaggaccttgggagtagggaggtctggtggggtgggatgggggtggtgggaacatccctgtggagacaaggggtggggaggaggtatgggatgtggaacagtcagaagtagaccaggagggggataaaatatggagtgtaaaaaaatgttaaataaaattaacaacaaaaaaagtcaatttctccacaaaaatcatggtatagtcaggtctgcaaggaattttcttatttaaaatgtgatggggcagggcctgtcctactttagatgatgtcatctctgggcctgtggtccttcataggttctaaaagaaatcatgctgagcaggtctagaggagtaatccagtaagcagcatccctccatgacctttgcaccagctctcctctccaggttccttcgctatttgattccctgccctgacttcctttgacaatgaacaatgatgtagaattgtaaatcaaacaaacccttcttgcttgcagttgtggtgcttcatcacagcaatggtaaccctgagacatgcatatactgtagcgcccagtacggcatggtgattccatgctaactgtgtatctaacacttaactcatctatcctttctttagtgtgacatttcgaacacgctcttttgcggtttacagcgtagaatgtgttattataaactactgtgctcttccatgcactacatttaaaagtcaaatcctcctaaaggagactcagagagaaaaacatggtatgatcacgtatctcttagggatccaataaagttaaatgtacagagatatataactagaatgactatcatctaagcctggagatgggtcgagtattgttcagttggtttcacattcattatcagttttcaatttgtttcttttaattatttttggtccccaagattatataaatacatatcccaaagtatatttaaaaaaaaacggcataggtatattatgaatgagttaggatttatcattactgcttgtctttctgtggcatttttgctcaaccagaagtttttggctatgctttggaatgttaaagtattatcgaattaatatttaaatgagaatcttattggttcacgtctgtttgtgtacagctgttctgtgtcttttctcttgttaatcacctttcaatgatacccataattgaaagtattataacttttctttgacagagaaaaatgtttatttgcctgatatcaggtgatttccttatttatgataatgatatataattgcttcttctaaagtaatgaaaataataaacataacagtcaagtgcatttgttagatctttatgggactatggttctccccttgctcagcttcaaacccttgaataagctaatagatgcactttgaccaaattgtaactaatataattttgtatgtaaatgtcttgtttatcttctgaattgtacatttttgttcaaatatggacacatgtatttattttgccttcactcacttattcatacacttagtcaatccctttctcgttcatgaattcagagaaatatagttaattacatactttcttatgctttcatattgtttatcttctcttgttcaaaatatttcatcatttgatatcataagaaatataatgcatttataattttgtattgagtccatacttggttttttttttcttttggtcatggaatccagggctagaaaaaaaaatccaaacatcatgcaatataatcatatacattattgagaagtcacttcttaaaaatcaaaggaattcgaatttattctttattctgcttcagataatatttcccttgttagccttaattaggacttgtttgatattcttggctgtgtatgttatagttcagctctgagtcattcctggtggtgccagcacttctgatgttctcctcttgttctttcttagccatcccaagctccagcatcctcccttctgctcccagagatgtgctccctgtcttggtttctagtcgctttgtccgtttgagctggcgtccacctgcagaagcaaaagggaacattcaaaccttcacagtctttttctccagagagggtgacaacaggtaggtaccatcagtaaatttgagcttctttcctggaacactgttaatgtccaaatgaggaattgatggttgggagaacttcaggaggaccatgaagaatgtacgaaatgtaggcccagcccttctttcaaactacatgaatatgtttgctttgtcaaaataagataactttcaaaattgcctatacaacatccctgacaaaaggctaggatgcaaacgactatatactttttctttgatttttacactgatacaaaaataagtttttctggatatcaggagaactaaatattaagaaccactgttattattcatcaataatcatatgatctgaagaacacaatgacttttctgatctttaaaagaagaataaataataattgccatttcagatttcttttaggattaagtcaaacctgtagtggtcatagtggagagtgtatgtatgatttaacaaaagttgttggtgaatataataattggctaggtaagagtaaacttcgcttttacagttggaatttagcttgtgatttttgtttttccaaagcattttccccttcagaatatttcagtgtgttagggctaagccattttgagaatatattgaaggaaagaagccgaaactcatttacaggtgttctagcttctcgtgtgtagggcttccatctgatgggatctttaggagcccaggaccctcaggacacttgattgttaggtgatggttggttaatggtacatgacagtgatggctgacgaattctattcacactgcttcacaaatgggtttactaacagtaattaaactatatcctttacagtttctggttttgcttaaagtttgacccaactgtaaaacgagaggggaaataaatacagcacagcgtgtgattgctaggattgctcactgaaatgtgagcaggcatacatttaaatacatctaaattcagagtatgaagacagtaaaagcttcaaaagtcctttgactagtgaactccaagtctaattttgattttagcaaaggtcatatatattatattattatatattattcaacatatattttatatacatagatatatattatgcaacagatatatatcatataatattattaatatattatcaatattatatgaaaaataaaaataaattaaaattaaattaaaatttaaaaattaaaaataaaaaagattgttccctccaattttcataagcacacaaactgagttccaaatcctccgcacactattttctaatcatgatcttgatcctgatgttttattgcagctggtctttgtattagtgttcgtcattgacctgtatgtcgcttaactgaatagtaattatggttctgctcatccgcagtccatcagccagtgctacccgggttgattacctcctctgtcttctcacgtgactacatttttccttgtgtcatgtcctgccctgggctgtgctgttgtggtcagcttcgcatgcttgcttttccttctccctcctgaactcccaggcttttctatattgaattgccccgggactcattcttagaggatcacttcaagcttgaatatgatctctgagtctgtgtctgttactgtctttaaattctctctctctctctctctctctctctctctctctctctctctgtctctctctctctctctctgtctctctgtctctctctctctctctctctctctctctctctctctctctctctctctctaacttttacctggggtctggactcattgaccaatttttttttcacttgaaatcaaacattatgattgaataaaaatctaatacatgctctccttcaactttaaaattctcacctaaatctttgcaattccacagtttctgtctaactcattgaaaaatatttctccaatcatggcaaagactttggagtaaatgccaaattctctctttttatttatactctatccctaattaattctcaaacaacactttgtactaaaatctaaatagttcttgtattcatgaaagaaatacttgtttcttgttataagataaagaataagtatgattttgcttttagcttagtgcgaaagctcaagaagtttataatgttactcgttagatttggtgtttagattgagttcaaaagtcaattatcagaacatatattgagtcctaccatcttcttttatgtaagctactttccatgatatcatcactgaagtctgacaagtcaggtgtgtaacaactgacttcacattttaaaacatgggttggcttttttctgcatcaaaacctttcattgacaactcttcattcatatttgcaaaagctgcctctcctgggtccttgttctctctttattcccatcatttatattcttttatgtttcataattcttcctccagacctcttaaaatatgttctaaatctactcataatatcttttctctatttgctgtcatgtacacagaaccctctacttgagtccattcccacaactatgtaagtctttacataatttctactgtatttgtgctgaaattcacttcttgaacatttttctggatcatttgcacttgttttcaccttttcttatccatagagtttgtctgtctgtctgtctgtctatctttctgtctgcttgtttgtttatgggttttttgtttgtttctgacgtaatggagaatacaagatactgtgatactctgttaacaaagctagttaaaaactttgaggttcaaataatttcctcaactcattcttccaaatacctgagactgtcactgtgcctgaatgcttcgactattcttttttacacttattagtatttattttcttaaatttctttctaccagtggaacagagacttattttgaggtgtttgtttgttgtttgtttgtatgtttgctttacctcctttgagtgctgggatgttaataacacctataacaataactaaagcatatcaacactagctatgtttcaaatttaaaccctaactgaaacatcaactactatatgaagctacagaggattccaagtcataattcatcaattcattaatttctctttcacatcttcctttgtgtgtgtgagtgtgtgtatgtgtatgtgtatgtgtgtatgtacacatgtacacatgatgtcccactatatttttgacatattcatgtagattcctctattgtggatgaaaagtaaattctatccaatgctgataattatgattcggatcttctaagataaatttgcagaaagacatgtgtcatatttctgatagattctttgcctaagcagtaaaatgaatcatggagggggaaaacactgacagctattcaatgaaacttttcataattgagctaaaggaactgatgttgaaatttgatttcaacattcccattcattttgcatgttctagcttctctctagagcaaatacatgccatatgtccctgaaggatgagctgtgagagttgtttgcatatgtagatttgtttggctcctcaaaacaatcatgttttaaaaggtagaggatttaacatctgtgactgatgagcagcatctctggcagacaaattactctagcttatgttgtcattagtctgtctgactggttaatattatcgataatgtaagtgccatttttagcattttttaacctgctcctctgcatgctttcatcttacaattaagagaatatattatattgaaaagttaaaaatcaggtttcatatggaaaaaattgcatcacagatatccatgtgtactgaaaaattactagaactaaaattgatcattgagatcatgatcgatctttcttttacttaaacattcagagattgatgctcagggaaagcagtggttcctatgtccaaagctgtgaagttggcaccaacaatgttaacaaacatttactgagcacttactacactagattgtaggcaaagcttcttgtaagtgtgtgtgatcattagtgttcatgtataagcattacacagataagggtaggagaccaaatttctgttatgtagattttaaggggaccagattttaatttaagggtgagtccaaatcaggtatcctcacctagtttctcctgtagtaaattaaagagatggaagagaagttagctttttgatatttataaaattatgacacacatttttctcaatatttctctccaatagcttttcaaacttcaaaattttcaatggataatctgatctgtttattcattttccatgacttaaaaacattagcctattttctatctctataaagagcactgtagctttcatttaactgcctggaaattacttatagagtttgttccagtgcagtcaaagtgtaaaggtaatggagttatagaattgaacctcagcatttggaattctttctcagaattttactagctgtgctgcctttggtcaatgagtaattattagtctgtatatctaaaaatataaaattaatagtggtatgcggtgtgtgtttatgtgtgtgtgtgtgtgttgcattgatgtattttagacttaacattcttataatggtggcttgcacattgaagaacacatgaagcaataactgataccaaagctccaggaagagtctagtatgagcctactttgaaaagctgaagaaactggagttagttttctacaagggatggcagcccctgtggacacattcaccatagaggaccagagcttgcaaactcatcctgatttgattccaccttgtactttaccctttgactgtcctaccatagtactccttcagttggttgccctacatgctgcttctggaaacatctacagacacacccagaacattgtctgattaattttctactggtcttctaatctagtcaccttgacaatcaagataaagcatataaaatttgtaattttgtttccgtgtgtggggtgacaacatttggtatataagattgtgatacgtattaagtgaagcttatacatgtatctgaaacatcacttctttgcccatggcaacaaaaacaagctgttcctgttaactagtgccatatataaaaaattgtgtgggttcaaaaattaaaatatatgaaatacaggggcattccctgacacttacttagaggagggatttattgctttcataaacattattccatttgacccccagataatgttgttatgataatttccatttatagaagagaatgttcagaaagactgagaaatagtacctaagcagctttgccaatagtagacagtagaaccaggatgcagatgcaaggtgatcccttcaccctacacacaaaataagaaatatcttcctttaaaaggaacaagtaaaatacagtaggcgttcagatgagagaattaaaacacttctataagcatcatccactttaatcttcacagtagccctgtgagataggtagaataaggtgggtattttcattttgcaaatgaagcatgggaggctcccagacacccgacatgttcaaggtcacctgcttctttggaatagaaaaaaaaaaaatcctggaccaggtctcccattgtgtggcattgaagtttgaagtttactatggctctgtgctgccacagaaacctgtgctcactgccagggattagagacaaggatttatgactgacagagaggattcattttagaattcactgtgcattacattttccaacacggtgtttacatatccttcccgcgctcttcagagttgagggctccgtggctgatgaagcttgttatccatgaagggagtgtattgtgatggaaaaaggaccagcctcagtatccaaaccaccatggtgacccaggcatgaagcttggggaagtcagctcttccctcagagcctctacttcagtgtaaactgtaaagcagacaacttttaccaaaatacttttctaggacattgacagagaaaatgataatttccttcctccaatggatgcaaaactaaaatgggccatcaacaaaggtgtaggcttagatttttccaagatctacttttaataagggttctcaaatacttccagtttccttctagcccactgaccaaagtaaataggaccagggaatatagacttgtttagaagtacttccttgggtcaattccaatctcagattttcagggtaccagcagtccagtttaataactccaagtatcagcagcagtggcatcatctagcagaaatcaccaggcctctgatgaattgacatgggtcagcaggagtgaccaggacccaccgggaccctgggagaagttctctgccatgcctctctcaatgtagcaaagatcagcaaagatgaagactggagatcaacaaaatgattcaaatctagctataaaaacatgcagccactgtccgttgaatcctatttagactctttccaaacatcacctgtcctcccacgggtcttgcctcagcaaaacactgtatgagtctatattagcagaacaccacatgagtctgtattacttatcataaccagaaacttccatttcacagggctacattaatcagcacatgttgaatgggactcaacaattcacccagcactgaattagaattagtagaaaaatcatggtgcctctgaaagtctttgaagaatcttcctactaaagaatgtctctgatatgggttaaagttcagtctacaggaatggctgtgaatggaaagaggaatctagaccagaggtcagctgctgggaacccaatagacatgcagccagcctctgaagaagtcaaagaaagaagtgattctggttgagaagcccatacccacaatgacacaattcctccaacaaggcccaacctattctaacaaggtcatacctcttaatagtgccactatacaggccaagcatatacacgccatcacactcacaaaataaatccttcctaaaactatcttctatattcatatgcagtgcatatgcctaaccacctggaagctagtcttctgtttgcctttggaaggagttttagaactctcagctcctcccacatcatacctgcctgggctatgccatgctctcgtcttgataatggactgaacctctgaacctgtaagccagccccaaacaaaatgctttccttataagagttgacttggtcatgatgtctgtttacagcagtagaaccctaagacaatgagtttagtgtttgtctgcatgtacgcatatgctacatgtgtgcctggtgcttgcagatgccaggagaaagcattagttctcctggaacttgagttagagacatctgtgaatagccatttgagtaccaagacatgatctgcaaaaatgtgggtcttctgcaaaagcctggcagtattcttaattggcggacagtttgtcctggcccatatttggaggttcttattgctgtcggttggagtcctattgcagtaagcagtaatttctagttttgaaatactgccacaattgtacttttagtctagttttctggtaggacctcactgtgtctcctctactggacttgaacccattatcttcctgtctcagcctctaacctcagcacttttattacaagaatataccagccagtcttgttgtagtacttttacttactagaggaacaaaaatgaaaataaacggagaacaaggagctgctacaaatatttttcattaaaatacagtttcttccctacaaaggaattaatgtgatccttcttcctggaagccactaattaggtacttggcaccttatgacagcatttgttgctgaaccattagaattaaatgttaacacccgatacacttagctaaagaagaatatatttatatagtagaatttttttgttacaaataaatctgcaaaagcagaatcaagtttaatcctcagtatcatttatctctgaagtaaaaaaaaggcaagttctaaattcagctaacataatcacaaaaatcaaaccaaaataaaatgaaacaaaccaaaaagagctgaaaaaatgattatttgttctcttcctaagaggaacattatacggaaagatttctttgagcagctcacactctctggtttgtacatagtacaaccatcatcaagaaggtgaaataatatatgatcaggatggagttaaatacagatttggaggaatttctaaaataatggatgtgtgtagattctatgtatacaatcagttgaatttttcaaagtaatctatgtactcacttaaaaattatggatcttagaggcccaaactatttgctaaagtaagaaagtatatgtggcaattgtgcatagtgcaagggtgcaaggtggcttctattcaaagtaatggctacaccaatgagacattcatggatattaatatacattatcctctatgttatagacgctatattgaatatataaaccacaaataatgagaatatggagagacactgattaatgttgctgaaactaggagggaagactgtcaagactcggttaaggcattgcatttcattcgggtcctaattaagtctccctcgaaagaagaccttgccaagtgcaaaaggaaatatgagttgaaagatggtcgctgactgtccatgaaatgcacaaaacacaagaagaaagtcagagtgggatgctgcagacagggattgcattcaagcaataagtgggatttttacagaggagtgtgaaaaggctggaccacattgggagaggctccaggttgtccccaggtcgtgagtttgtctcagctacaggatgatggcaggacacaagaccatgggcatgaactgacagattacgtacgtcggaaaaagggttcaatgaaaagtagcaataactgaaacttaattttaaagatgaagcgttaggagaaactagccttctattgcaagcaccaagtacattagaatctctttggagacttaaggacctataatcacagtaacctaagcagaattaagtctcagtgcaaaattctgaaagatgctcttttgtttgctttgtgcctcaaaacgcaactgtgcttaaggcttaatatgtgttactgggagaagacttctcctgtttcctcattcctcaacctcagaagcactctcaattcaggaagcagtcttaattgttatgctccagagggagaagaaatcacaccacggccagagtagagcttattttttctaaggtggatgagcaaaaatgaggagtgcacattccagatttgagaggggaccaaactgaaggcaaggattaaaatctgcctgcagtatctggactcataagagttggtgtagcatctcttctcctggaacaagtctaaggctactcctttcctgaaataggctttcttggaatacacactgacccaaagttcattcttttacaaacagattattagatgcaaggatttgggtaaagttgtaaccacaggtagagctgagatgtttactggggtaaggtgggaagacagaagtgcctacgggatgggctgtttgggagccagttaaaactagctttgataattttttacccagagtcccattcttcattttactggttatctcagctctccccttcccatgcttcaaaccttcttaattatgttcccccagcatccccagctttgctgttttacctcaatggccattttaacactaacacaggaccagctcacacatctgaaatctcaagcaccaagaaacctaggcaggggaattgcagtgctagttctagactggctaatgtagttagacacaatctcaaaattaaataaaataaagtatatatgaattttccagaaagactttcaagtcatgaattatagtgacattgttgcaaagcagcagggttattgttgccaccttgcaatataatattaaaatggtaacctgaggcagctttgcccatgtaataaataaatgctcccattgagtaactctttgtcactgctggtaacagaaaggagaagttgcctactcctgctttcctataagaagattcaggtttcatagtgtctatgagtgcatctgtggtgggcagattctagaagccacaggctactcagtcctctaaattcatccagatgatcaccacatctcacctcggggtagagacaattgaagggaggaaggcttgtctgacagtgtctactgctgctctagcatgcaatggcaccttgtggatatgagggcattacattttcagttgttaggagagcacacacagaagatctctagggccttctgtctataccaaaagactcacaaaatataaagtaacaaattcttcaaagttaagaaaggaataaaaaaataggtacagccttacgcctattgtgctttgacttagcaagatgaacataggacattaaatctgattcaacgactttattttctttttggtgttgattatttttattttaaatatacatatatatgtacttcctataataatttgaaacatgcataaaatgtgtagtaatcaaattgaggctgttggcatttttatcttcttaaacctgtcttatcatttctaattaacacattataagtatgcatatttatgaggtatagtgtgatattttagtacataagtacaatgtatactgatcgaatgatgagatgaaatacttctctctgtcatattgtgtagagaggtagagctagtttgctgtctattgctgtgataaatgcgatcaccaaatgcaacttgaggagaaaagagtttaattcatctacttctaggccaggttttgttggccaaagctatacaggaataaagcagaaatgaaggagaaactctgctgacctacttgttttccagctcactctgtctcatgatcagctatgtttcttacacagccctgacacacctgcctagggctgggccagcacagtagattggaccatttttacatcaatcttcaagtaagttatcttacagatatggacacaggaccaacccattcaggcaattcttcatggtgagatttctgataagttgccaaataaaactaaagagcactaaggttttgaggacttcttggttatttgtattatacttcgtagattattataaagtatagtcatcctggtatgctgcaagacactagagtttaatcagtactctgtaatattttggcaaccattaacctatttccctctaattcttttgcatccatcgtcttccttaacctctattattttgtagtcagatcaaatttgattttttttttattttaaactccacattcaagaacatatgttatttacttctttatagatagcttattttactgaagataaactccagttccaaacactttcctgattactggctttattcccctttatgagtaaatattatctactgtgcatgtacaccccatgattaagcactcatccatgatgggtatctagatttgtcaaatctttgctatttgaggatagcacagcaataaacatgggagtgcagatgtctattgagagttggcagcatttattttgacaatatccttgtaaatagaagagttaaattatatggtaaatctgtgaatgatgtttctgcaatgactacaagaatcttagttctggtactctttactcaatattattttggcctttttgacaataaccactgtgaccagtaccaacagcactatgattctgaattttagttctgtggtgccaaatgaacttcaaagcattcccttaagaaaacatctgaaaaaatctaatggtcattagacaaaataggtatcagtttaaatgtctccaaaaataacacaaagctcggtgacaaaaatgaacatttacaacaaaatccccatgagaagttataaaaacattgtctagcaataaaatgtatgaaacaattcaatggttttaggatctcttcttaaatttgtattcaattatgtactaagggtcagtgaacatatgaaggtccagagtcatcctttaaaattatttaactagttctccttgctgaatgtcagttcaccagccacatgtctgcagactcactttttctcaaggaaaaaggagaaacaggagaaatgtcctttttggtaaacagttgaacacatggagttgtagtttgaagaacaaggcaaggagacatgtgtgtattatcatttttcctttacaaagagataaatgtccattcttcctgtaactgaacttagagaagccataggaggcagaatttgatatatacacagaaatgcttctcatctgcattttgctttccaacacaaaaatgcatgaatgaatctgtacacaatactaggaaagtccaaaggatggaatgatttaaacattgacttatctctttaaatgccttttgtaaaatttcatctttctgtcctgattgcagatgtttcttctcattctatagactctttgcttgccatgacttttgaaaactaaattttaaaatgtcaaaaacaagactttaatttgctagttgccatgagaatgatggtggcttacactctctcagactttgctgtgtcttcttatgggccctttccattcacttaattttcatcatcaaccttggaatgcctgaattttatcccagagtcaacattaaatgagtaagcaaccttttggttgctcataatccctgtatgccaaacaaagtttgggctaatgctttcatcttaagataatatttctcttcaccttgatttcctagggagcgagctttgaatacaacccagcctgggtcccttcagcttactgtgggaaacttgaaaccagaagccatgtacaccttcagagttgtcgcctacaatgagtggggaccaggggagagttctcagcccatcaaggtggccactcagcctgagtgtgagtatgaaaatggaagggcaatttttaaagcatttgtattcactctctacaacatccatgcctcctttgtagaatgtttttaaagggtcaatacggagagaaaagctctgtagcaacgcatttcacttaagcacttttaaaagtaaactagactattaaagagacactgaacttattcaaactataataggaaattataagtgggaaaggaaaattttcccccagaaatcctcttgcttctcttctatgaagcaacttatcctgttaatactattctgttagcatccttttccattcatttttcatatattttttattttattaaagaaaaacctaatagcatggaacttttaatctcagaaacctattatgaaacttagatatgcactaagtatgcccaagaagctatcagaagccggacagaaacactcaggatagggcaattgcatctattcactacaccatccttgaaatctaattacgatattaaaatatatggtcccaaagtaaaggagccggacactgcttaaagaacttaaaatttaatgatttgtattttgacagtctccgagtaaaacgttcctctgctttgctaagctttgcttacacattttccatatattttatgggacaaattaaatgagtaaaagcaaacttttggttgttcattaccctcatgttttaggggacaaatcactgtcgagcagtttgtcagcttatgattcaatgaaagcattctaatctaaaagttaagtttactgaatgcgtatgtatattaaggtgcactgcatcacgtactggattccagctcctcctttccaattaataatgctaagtgtatgacttcttattgttgttgttttgtgctctcactagtttatgttctctttaaaaatttgtgtttaacttaaatacaattagacatgatttctaaagatgatatacaaattagaaacacatcaactagtaaaggcaaacaaagcaatatttttggatggtggtggtgcatttcctctatcatgggaggcacagggaggcatcaggaggcacggggaggcacagggaggcagatctgtttgagttggagggcaccctggactacagattgagttttagggcagccagttctacacagagaaacccaaccctgtctttaaaaaaatcgaaatcaatcatcgaaatggctcactatcatgggtctatgatatcactgtggtgaagatcatggagaataggttaagacaccggagtcatggtgaatgactgactcttgggaagacccacagccttttttttcttgttgctgtgattatagatacagtgtacgataattatccttgaaagtagaaatggttaagcctcaataatcttctaaatgccttatgaaaaagtatattccgggtagtaacttcaaaagcattgtgatacatacattttcaacatttagtagtgcccagaggatcctgaggagaatccgggaggtaacttttaggatgatggatataaacactgggcttttattggaatctgtagactaattgaggacaactgcagccatcatctccacagagccaatttaaacaagaggccaaacatcatctccagccatgcacaggtagagcttcaattgctctcaaaaatttcttccaaagaatgttgtgttgtttaattgatttgaataactagacaaagggctgtggagatggtttagcagctaagagcactgacattaaacctggtaacatgagttccatcgctggtggtaagagagaactgagtcctctaagtggtcttctgaactccattcctgcttgtgctgcggtatatgcatgtgtatatcgtatgtttatgtgtatgtgtatatatgtgtgtatagtatgatcatatatatatgtaacacacttcattttaaccttactgactataaaaatccctcaaaattataaatagaaaatgcctataaattattctaatattgaaaatctaaacatgacattgttctctttcaagatatgaaatttctatgcaatatctgaaatattcatgcataatgctaatactttctagaattatgttcacgtaatattcaagaataacagctcacgattactttgtatttctgataatcctggtttagtcagccttgctttctcaccagggacaccatggtttctctttcctcaatgaaatcattttgaatcttcctactttaaaattcagatgggtttcttgtttgtttgtttgttttttattttcgtttgttgtccttgttgttttcctttatcttaggtttgtataaacagcagtggtttgaaatcatggagccaaaacacatctgacaacagctgctattagaagcacttccttgtgatacaaggtctgccactttaatgtgattattatattagatttacctatataacgacgtgtgtccacaaaaattcttacctgtagaagacatagagtggcttaaaatatccagttatattttgtgaatagctaccaggtccctaatactattccacactacttaaagcatacagactatttaaaggaaggaacgtgcatgcagcttattaacagtgctcatagaagttggaggaagtaaagaacacacacctttttttaaaaaaaaattatttgtaattcattttatacacttcatattacattctgtgccacccccatccatcctccaactactccacattccacacctccttcccaccccaccccatcttcacgaggatgcccttacccccaccccacctgacctctaaactccctagggcctccagcctattaagggttaggtgtatcatctctaaatgaacacagacctggaagtcgactactgtatatgttggggacctcatatcagctggtatatggcgtctgtctggtggtccaatgtttgaaagatctcagaagtccagattaattgagactgctggtcctcctacaggatcgcccttctcctcatgttcttttgtcttccctaattcaacaacagggatcagttgcttttgtccattggttgggtgcaaacatctgcatctgactctttcagctgcttgttgggtctttcggggtgggatggggcagtcatgacagatccctttttgtgagtgctccatagcctcagtaatactgtcgggccttgggaccttccattgagctggatcccactttaggcctgtcactggaccttcttttcctcagactcctctccatatccatccctgtaggtctttcagacagaaacaatatgggtcagaggtgtgactgtgggatggcaacgtcatccctcacttaatgtcttgtctttctgctggaggtgggctctataagttccttctccctactgtcaaagggattttgtcaaatgtactggagattttgtcaagagtactgggagtcgggctggtgagatggctcagcaggtaagagcacccaactgttcttccgaaggtccagagttcaaatcccagcaatcacatggtggctcgcaaccatcctccctcgtctggagtgtctgaatatgaatatatgtcttacatataataaataaatctttaaaaaaaagagtactgggagtctctcacttcccaggtctttggtgcattctggggggttctcccatcatcctatttcttgaggttgcctgttctcattcattctgctgacccacggggcttcattccttttctctcacccaatacaagatcaggttccggtctccctgccattgccaacccacccatgtccactttctcttccaagtcctttccttcctccctccccactcatgattgttttcttctctctcccaagtgggactgaggcatcctcacttgggcacttcagctttttgagccttttgaattctggggattgtatctggtgtattctgtatgtttgttgttgttgttgttgtggtggtggtggtggtggtttgtttgttttttgttttggctaatatccacttattagtgagtacataccatgcatatcctcactcaggatgatattttctagttacagaaaatgtggttcatttacacagtggaatactactcagctattaagaacgaggacatcctaacttttgcaggcaaatggataaaactagaaagaacacacacacatctaatagtcaaaactgctcaataagagatccaacaggaagtgctcaaatggaacacacttgagagctctatgtctgctcttgagcatgtttatagatatgattatgtgtcagttcgttttttaatgcttgatcattgtacactcacctcctcggatcaatgctgtattacaagagcactctcatcatgccttcaatatcattcagtgctgggtactcgaaaaaacaagagaatagagttgaccctatagctcagtgttcaagaactgattcagcctgcccaaagactgcaaaggaaactacaaagcaataaataaaccagaccctgattcctataaatatttattttacttaatagatggcagaaaccatgatgaagcaactgagcaatgtgaagttaccaattgaatgtaactgattgttaatttggtaacatgtaaagaatttgatttttttctcaaaagaatgaaaatggagattccttctgctttaggaacatgtttcagccttgagtaacttttcatttaagaacaataatgacctcaggattttcttcatttttgatctttattcacagcattttatttaaaatagcctcggttctctcttactgtggattaaagatcacttttgtattgcactgcagcttgactgttttctgagagttgccattggctcatttgtctttccctaagtagatgggtagagagggacaaatcagcctatgtcagcaggatgtgaattcagaatgtcttttagaaagcagacactgaaccgcatcattcaactcatttatactgagtactctgcagcttacttattacatttattatagacattatgataaataaattgcattattatagctaatagatgctacaataaatgccatttgagcaacatgaaaacatcactaaggtttcttaataactccccaaatgttgaggaagatggtatactgaagagatctagggttctcccagtcattacttttatatgtatatatcactgtctatatttttagagaaagtacagagttgaaattcattgtgccgtttgagagatgcaaacaaaagaggagaaattttgtcagtattttccactaacagaactattttatcctttgaaagcagatctcatctgagtttatatttagcttttgcttttactgctgtttccccaaatgtgatgtcgtcattatacatggccactgcaccacctttatacaaacttaatgtccagactttcattttatttgagtaatctgttccattaggaaaattgtgttttcaaggaataaagcccggtacaaatttgtgtgaaatataaatcatcaacaactgtttctataagtgcatgcattctgctgcaatcatttagaaagatcaacagtctgagatccagtttataaaataatagcctggaatagaagagcttgatttttatgaaggcttgtgtcctctgattatatcttccttttgctaaacctttgcccttttctcccttgcttttgtggtgtgtaatttctccacagtattatcaggcaggatttaagtccctgcctgcctaagacatgtctaatcttttcataccacatgtggtgaatttttgtattatgtggggtccccaaaatgctattaaggcagtttaatcataaaggatgttaaaatggaccacatacaggctcgagggcctgagtaacaatacaaatcctgtttgctcaagcacagcacaattttctgtaaaattcttttgtggttaagaattgtaagaaatattcttaagtttcctgtattctttacacagtaagatagtgaaagcaaccttccaagctgattaatttataaatgcataacataaatgtatagctagttacattttcttgctttaattattttttttattacggcagggttctgcttgtatggtatatgatgacaacagagagtatcactataagcatcccagaggctattccataattgttaggacttagctcttctgaagtctataaagttaggtattacctagttcccattttcacaggctgtgaaagtaaactgaaatgatagagtttctaggttgtatctgccatcgactagtcactcagtagccagaaatctcccaattccaaggagatgagaattaattaagagcataatagcaactattcaggctgtaaaagatgtgatgtactcacccctgtaatcaactccctaaatgaggctagtttgagagctatggttttggaatagtttgattactatgtaacagtccttttatacacattggtcagttcttaaatttaaaaatatctcactgcctaatcctctaactttgcctagtatacatctttgtggccctaaataaagttaaatcttatgataagaaaataatatattatctcataaatgggctactacattgtaacattataaatattttattcattaaaagatacaaatggaagaagatttgtactctgtgtataatacagatgagaaatacaagttatgtttcttcgtggattttcatctttattgcagttgtgtccagataatttctttaatgacttgatcgggattctaacaatcaccatcttgattacaacacaactgaattacaaagtgttttgtataaatatctgaaacaattatggagtcagagttgatgactagccagttggtggtagttcagacacacgtctagacagacagtaagagcaaagatgtagacaagaatggctaattggtgtctcttggcagctaagagactttgataataagttaaaaagtctcttaatgtaaaacatattttcaagtattagaattatagcaggcaagacctatagccaaacattctagtaacacaacactatggaatagggtaaccctctgcactatatgtcaatggacatttaattataataaaatatgatcaatgtttcaccttattaataacatgtaaaaatgaaatcaatttaaaatcaaaatcacacttctacatttttttccactatcttctgcactggacactatagaccaatcattccatgattgtaggagattccctcacctgggatcagtttaaactctgaattagttaatgactataggaacatcagtcaaggcacagacccattctcaaggatctatggctctaacagaagtttttggttctgtaaatgctctaaaatgtaattagtatagatcacattttagcaaatttgtattgctgtgcttcctagtggcaggagcacttttgtctaaatagaactgatgtcatattttatcacacattaatttctcaacttcttaggatggaaagtaaaatataaaatttaaaaatattagaccagaagataaaatattaagaaaaccaatatagtttatatcttaatctctgctgttgaagcaaaggaactgtggctggataattttcagtggaaagtatttcctatagttcaggaattagaagctacaaaatgaagggttggtgtttgctgagatcaagtctctgctgccaagatgagtgatgttgtgtcacaatctccataagaaacacactgtgtcctctcagtataggactgaaagaagaacagggctttgggggaagggctccaggtcagtgagctgtttcatttcatgtcttagaaaagacattaatcttttgatgatggctgagccaaaattttgtcctcaaatgctgctcttcataatagtgttgtctttaggcatgtctcaacatgagccgtggaaacgagaaaaatgaccttaaaatttaaaaaaataaaaaataaaaaataaagaaattagtagtatgtttgtgttgacaatacacttataaaataatttttatcatacttagtgatgggtttttatgtattcctgtcaatataaagttagtattccaagaactagtacaaaatcagcatatagtttattagtagatttatgcacaaaacatgctagcttttagcattcatgatcatgggatagtttagagcatgagactagcatggtggcttacacctctatttacagtacccagagacagttgcaaaaggatcgttaagttccaagatggtctgaaatgttctattttttaaattatatacatatactctatattaatcctttgtcagacatataagtggcaaagattatctcctatctcatgggatttccctaaaccctgctgattgcttttagctcaaccttgtcatagagggaaggagaaaagaggtggggcagaaaggatataggaaggaaggaggtataaaggaatatagatcatgacaagagccaatcaaagttaaataaatctcacttttatatcactcctctatggatgcttttaaatgtagattctattctgatagctatataagtggaagattgtaaatgttttcctcccaaaacaataaggatagatgactattctttaagtctaaaactcttaaattttattactttgatattattactgtgtttatattggaggataatgtctggcagaaatagtcatgggcacagtggctcctaccccatggaagcacgttccattttagcacaatcttccctgtcagtggggcaaaaagtagatataatcagtcaagtggggacacagtttctgatcacagaacattttacaggcaggggaattgccctggtttgaaagtgaaagattttaaggtgatgaaaagtactccatatagccataggtgttaaaatgaaagttaaattgttgccattagttcctaaacgtaaatgatcaagggtattttttttatcatctcaccatcttgaagatgggctggggataatgtgagaccacagccaatgccagagaccatacatgttctcctttttaaaatatgtaacctgagctagaagcacacagaatctgtcaggagccaggcagactttcaccctcgctctgtcatttaccctgttactgcatgaagtttgactttctaagtcaggcccatcatatgtaaagtgaagataatgttgatcttgcagctatgggataaggaccaaaagaaagcttttcaaacaggaataccgcagtcctccttcacagggcacttgtgatgatgtgggagatgtgtcctgctttcatcaagttctcagccctcagtgtcgttactattataattttccatgattccattacttgattatcattattcatacgatcatgttaatatgaaaggtttcccttaggctagttgatatctcttttatttatcctttacgatgttcagtaaatagttctaagcataatgttctctcctggcaaactcatggctatgtctttcagcctgcataagcccttgcttttactctctaagttagttagaaccttaactgtcattcattcattcattcattcattcattcattcactcattcatttgttcatttgctcatccattcattcaatcagcaaaaaatcattttgtatgcctcgtgagcaaacaaaatgctctatttcttggcaccagtaatcagcagttcattaacaacaaagcacttatccttgtaaagtctgtactgcagtgatagagagggacaacaagaaaactgtgaaagcatgaggaatggcaagactgtttcggggacacataaaattagggagagatagataattagaaaaggacagcctctctgagacagcattatttaattaaatgcctttttgaacctggagtgatcctggaaagttctggtcagacataatctgggacagagcctcatgggctctgggggagaactcaagaaggctggactgtgccacaggaagaaggagcaaggcagaggggatttgtgagggggcaggttctacttggagatccttggaatctggctttaacccccactgtgagaaacatctgggcaggagggtctggcttgatataatactcaagattcaatgtgatcttagagatcatccacagtaggggaagttgagagttggttagactgaaggtttgaaggggggatgggaataaggcatggtgatgggtatgggattggaggaagaataggaatcaggattacttacaagtcttgcttttcagaaaataatgaattgttgaaatttggaaagtgagaggaaagaccaattcagatggtgtcttgagagagaaggtatctgagtaacaaagctggatactttttatttgttagatttaactgttaagtgtgtacagatgttgagtattcatttggactatgagctcaaagaaattactcaataatttgactaggaaaacaaatgaaatgctgcacgccaccaagctaatggccagagaaatgcaatatttagcctgtaaattggtgcgaaaaaatggcagtattttaaaaacatgaatgtttgtttttaaacaaacatttgttgtttttttttttaatgtggtaatttgttgagatatctgtacccacacatgtcccttgtggatatgtcgcagtctcatgcatgtgcacagtgctgtgaacatggtgaagtctccttactttcacaagcctccttgtcagtcctgtaaggtgtaatttgatgtgccttataccagaaagaattgactacaagcaggttttggatctgcagcacagttttccagttgccaagattttataaggatccaatccaaaagtgtcaggtcagtgccaacagaggtgttcgctgagagcctgcctgctctctgatgtgtacttccctggtgttcatttaactggaggcaaaatttaatgggatgccaatcacaatgatctataggttgaaacttaatattctatcactgcattacaatcaaataggcaggagcctggtttagagccaagtgaaggcttacagaattaaagaaatatttggctactgactttcaacattccttttctttcagcccttttaaaatttcaggccaaggtggtagaagagaaaatatgaattctttctgcccagattccaaaatgtttagccagtaccaagcatatcattaaatccacaaaaggctttgagattgtagctagcaagcagtgagcatcagaaaggacaaactttgagtctatagagcttaaagtccgatacagatggatcaacaacctggtgggctcttgaggactaggcttagattctggactcagaaccttctgtgttaagtggctgcctagaaataactgcagttcctcttcctgaagctgggctaagattttaagcaaactccctgggttccagaatgagatgttatctatatcttaagaaaatgtctttcccattctgattattggtttattcttatagtggccacactatctcagcggagtaagaaatcatcccatactaggtggtttataaaatgagtttctcgtcatcataagcctttaagtgtggaacccaagtgttagtagggccagacccctctctaggttctggaggaatatagatacttcttttattcttagctgctggtgcattctgataaggaaaggcatttcttggcaaatatctgcaacatgtatagctctgtcagtacattcccattgtagtcttcccaattcctgagtctctgagtgcttttctctcctttgaaaatggcagtgttcgtgttgtatttagggctcacatcagttacactaactgtacctgctgaggtaatctttcaaagaagggtatgttctatgatttcaagaccacatggatctgggtagaactttcaacacattatgtcaccctaccaaaattgttagaaagaccgaatataaggagtatatgcacgtgtatgatcaaggagtaagcatgtcatgtttcttttttgttttttgttttgttttgctttgttttttgtttttgtctttgttttttgagacagggtttctctgtgtagtcctggctgccctggaactcactttgtaaaccaggctggcctcgaactcagaaatccgcctgcctctgcctcccaagtgctgggattaaaggcgtgtgccaccaccgcccggcgtcatgtttctttttaacaaattaatatgttggctttaataatttagaataggtttagtttttatcttttaagaacagattttaaatgaattaatgtattggcttttatatttttaaatgtattcacttttttgcctctcagagaaaacaacagaacaaagaatgtcagtattgtgacatctccagggtcctcaagagtatagttgatgtgttcttccttctgttaactcttggagacctatagcacccaggacttcatgaacattaaggactgaaaactaagctggtaatgaaactacaaagtgaacacagtctgcttgatacagaccctgcaatgctgtcaggtagaaatgtactgtcacacagtacacttaaggacagtgcctcgctctgacatcataagctgttacataaaacgtccagtgcctgttttcaagttgttcaatgccctcacataaatcccctaaccaaaaatttgcaggctattgctcttgctttggaaaccatctagaaatccgtgtaaaacaccaggcactgaaggcagcatctataaaatcaggggacatgggaaaaaatcaagctcatgttggcttggaagcttcacctgtagctatcttgattcacggcattagaagttgttagccactgggtggtggtggtgcacgcctttaatcccaacactgggaggcagaggcagggggatttctgagtttgaggccagcctggtctacaaaagtgagttccaggaatgccagggctatacagagaaatcctgtctcgaaaaaacaacaacagaacaacaacaacaacaacaacaaacaaaaaaacaaaaaacaaaaagcaaaaaacaaaacaaaacaaaacaaaacaaaacaaaacaaaacaaaacaaaacaaaacaaaacaaaatgttaggcaactaccaagcagggaaaatcagcagcagccttatgcagctatgagctctgtgggttacaacaatgactgcagggatacttgagatgctattggctgggagtaggaggttgggaatttttttttcctgcgggccaggagggggaggtatttctatagctatgtacttacaggcagtcctaagaggaaaaaaataagcttaaaaaaaaaaaaaagaaagaaaaagaaaaaggaaaagaacagatgcatttggacaggaaaatggtgaggaggatggaggaggaattggagaagaagaaacgagatgaatatgtgcctataaaaatatttcaaataaacatataaaatcttcccaccaatttttttccccatctatcagtacccacatctgagcctcacagtttcaaaacttatgatcctagatgacaatcacgtgctggtaattaatatctgttgaatttaaccaaggcagtttcctcatacttggaagacaatccctgagccagaatttcgactcaaagcaagtcttggactgctttgagagaattaaatatgaataaagtaatggagctagaacttgggtttgaatctaccataatattcaaatcaaggaactgtgtttatgcaaactaagagccaatgagacaattttggagaaaaggaaaatcaaaagtaacttcattgttaaaatgcatctttgatgacataagattatcaacaagacaccattgtgaaatgttgctacagaaatcctatttataactataatgtatttataagagcatgacatgatggagattataaaagctcgggtgatatatgctaactcctacgttagagaaacatattgaacacatatttgttaatcttaacccaaaggtcttcacttagctaagtttcactagtaattttcagtgaaataaaattattattttatttttccagggtcttaatcaacttatatttaaaaacatgcttagcattgcccaaaatgcattttttttattccagtagttttatatatgacaaagcataatactcaagtacaaataacagcataatccttttgacaaatcatttgtagtttgggtatgtaaatttaacagtttaattagcttattaacctgtaatatgagttgctctatgtcttcattgttgttttaatattttttgtccatctctttggaaatatttaatcatttcctcccccattctcattggaaaggttcctaattgctctactagagttgactaaatttccattgcttattcaccatgactgcctctaatcacagtggctactgacatctcaggtgttggctttcctcaagtaagagttgtcataattataaaaacagatataagacagcataaagacttaaaatataccattaaatttttgttatcaataggtgagacaatacattcgatcttagtgaaatgtgtaatattacaatcaattttactcctgtcagatcttttcaacaatcttgctagacgatttaggctgcctatgagcacttatggaccacaagtttcttttacatggagatggcttaaatccgtggctcattcagactaagaagatgttcatttgccagtcatcacattaaattgagtttcaaagttgttgagatctaaagtttgaacctatcctctgcccccccacacaccgactaattacagattaactcatacatcaccggagcttccctgactttagtccccctttattcaggatgaaaaattagtgttcttgtaatgcaaatgaaagtcatgtccttcacttgatgtctgtcattcttcatacaccttgggtgtatacaccaaggcagtggcctagggaaagaggaagcagtttggatgtagctcaggagtctagtttaactctggtaagtcttcaatctctgatttactgcccaagtctgttctgctgctgctatctttgaacaagcctgaatcccccaagtggttaataaacttcttatcttttgaatactgaaaataaaataaacttaatcctcagggcggttcagtcaacagaccgagagccttttagatgcttcctggtgatatgggacagccaggttttcggccctttgtgattatcagtctttctctaggaagcatgtatgtgtacaggcagtaaaggtgcttcttggagataaatgtcagtggaatcacagagtgaatattaatttcaggatctccaaggtcagatatctgtccaggtccattgtaaccggaacgtttattggggctgtttctaggagtgatcttgagtttccccttccgtttccaagcatcaaggaagagaggaagggaaacatttcagcatgcacagccagtgctcagatggaaaaagtaccatagaactgtctcatgtatcattcatttgtcatttagggcagttattttgaatgccttaaaaatgatccaagttccacctatagggttgcagatccctttagctccttgggtactttctctagctcctccattgggagccctgtgatccatgaactaaccagtaccccggggctctggactctagctgcatatgtatcaaaacatggcctagtcggtcatcactgcaaagagaggcccattggacacgcaaactttatatgccacagtacaggggaacgccagggccaaaaaaatgggaatgggtgggtaggggagtgggggggagggtatgggggacttttgggatagcattggaaatgtaattgaggaaaatacgtaataaaaatcttttaaaaaaatgatccaagtttaagtttacaggatctaacttgggcagagaataaacagaaagccagcagaaatgaccagctgagattcctggaaagcaaagactgtatatggaaaaaaaaaaaaaagaagaagaaaagaacagaggagaaaagagcttaagcatcttttgtaggtccattcatagacatagggttagaaattaactaaatgggaacacaagaaaattaacgaggaggagccaggcgtggtggtgcacgcctttaatcccagcactcaggagacagaggcaggcagatttctgagttcgaggccagcctgatctacaaagtgagttccaggacagccagggctgtctcgagaaaccctgtctcgaaaatccagagagagagagagagagagagagagagagagagagagagagagagagagagagagattagcaagagtcagaagcactggtaggcacttaggcactcacccaccctacacagcttccacacacacagacgaggttctctgtgttgcattgtttctcatctcagagaacatcactcaagttatgaactatgcaggtcagtcctgtaggtgttggggttgaactcttcctgccgccccatcaactgaagttctcaatgatgcctctaagtctctgtctcttcatcaccaccatcatcattctgggtaaggctgaatttctctttctttagaattccagaacacttaacgattatgcttccaatggccacatttattccctctaaatttactccatactgtagactgatcacagaatgctgaaatcatcaattcctttctgagtctttttttttttttttggttgttgttgttgttctttttgttgttgttgttgttgttgttgtttgagacagggtttctctgtatagccctggctgtcctggaacacactttgtaaaccaggctggcctcgaactcagaaattcgcctgcctctgcctcccaagtgctgggattaaaggcgtgtgccaccgcgctggccctttctgagtctgaaaggattggaaagtgaagggattttaacgacttcttccgccctggagagttttaggattccttcctacttcagattctcttgctcttggctcttcatggttcctcttgcctccttggaccattagtccttgggaaaataatgtattgtgttctccaccaattatcatagttcctgacacactataaaattcagttaatctttaacaagaattttatttttgttatgaaccatgaataggttaatatgtatctttatagcaaggttggacctatatgaacctcatcttttaaaataagataattcaggttcaaagactttaaaatttttgaccttgtccacatagtcagaatgaagtttatagattttgacctatggtccctgactcctgaagttatacatatttctgctagcctttgttattaaatattaattgaatgagaccttctggcacttgctctatctggcttctcagaaatgtatgttgagagaatagagttctaagtgttttacttaatttatagtcccttccaaaacacacagtttatccaaggcagaaacttagcatctaaggacagaaaaagataaagaatgaatttcatccccaaagagatagtatcatttaaggtaggatagttttgttgttatgtagaaaaatctgttcatttagctgtctagaaaagattgctgatttttctcttctaacaaatggcagcaggattcttttataaaagcaatctatccatgtcttttatagctctattaaaactacaaatatcaaatatcgattcctcccgcactgaccacagtacaagcctacttcaagaaaggctgctgggactttgttacattatcaccatgggagacactctgggttgtgcataagctggagacacctgcttatctggtacttatctatttatagagagggaagatttttgtgtacagaaatataatcctgaagtatataagtctcaaaacagtgtgaagcaagcaaaggccaggaaatatgcttcttaaaggtgatgctactaaaggaatgaaacaataacctggtctctgcctactctggaaataaaaccatgaaagtcactctttgtggacataaacaagtggctggaaagtctcgattattatttgtagaaaaatctttgccatttgctgagggcatctcttggatgtgatttattaccatactcgtgaggaggattactgctgtattctgggactctttcctttcgtttcccatcgtaggtcatatctactcatttttctaacagtcctggaattaggaagagaaaaaatacatttgtttttcctaattctgtagcaaagtacgagaaagctgaaaatgaaggaggaactctttttggtagcagtgtcactcgctactgaattgctttgaatgtttattttctgtctgatttcctataaactttacatgataatgtaaccctgataaaagctatgatcaaagtatgtgtgtccctgggattatcagatagcagaaaggatctcacttcaggatttaggactccggggtttggttcctaacactttgtttctctcacagttaccctagattcaatgtgcactcatccctatttccttttgaaatgactaaagttcttcatggtttttcagaaatttcctttggacattcaatttttgtgagcaaacttttgtcatagctgattttttaaaggtaatattcaagtttttttgtgtgtttttgttttgttttggattgaactcatggtcttcttgccttggctatacaagggctatcaaacttgattaaaactgaacctctaggcaaacatttcgagaagaacacgggtgtgttttgagctttctttgagtgtcattagtgacaccacattttttctcttaattttgtagaataaattttagtcactaatggtgtgttatcaaacaaagcagcaacctcattacaaccccctccactgaaaagtgacttgtgtccttccattgtaatgagtttccgttctcatttagttccaattagaacttctcatactagttttacctgaagtcgccatcatctgaagcattcatctagaaagtgggagctgcccctcttaccggcttgtcctgaaaagacaaccagcatgcaatacgcatcaaattaagttttactgatgtttcctgattcatcaaattcttctttcttccttaaaagctatgttttcccaccaatgaaaatctgaaaattttttcaatagtagttttcagcaaaggctctgccttctcccctctgataatttagaattacttgttagattgttttctagaatcactatatgtttagacgtctactcttaccaagtacaataatgaacctactctaagactctaagtattttgtacctgtttactgtattttgatattttcctgcctcaaaatatctgcctcaaaatatttcacagtcctgaagaaagcacaaaagataaaaatgcagagtacaattaaatgtcaaatcctttgatgcaagctttctaattgcaatgggaaaataaatatgaccagctcatcgagagggataatcactttcagcctgttggaaatcagtatttttgtaaattgaagagtttttttctggacttaaatttgaacaatatattcagctttattttagcatttactatattagatactatattacgtaagttttacagtggagtgaatggaaggctcttgagaagtggctaaagattgattgaactaccataatcaggtttactataatcaggataatataatcagccagcataatcaagtttatataacctaaagctgccattgacataaaaatattgcatgggttttgaaacttagttttacttctcaattcttaatgctgtatctacgttttctagatcataaaataagttaacttataaatcctcgattttaatgagttacaatcttggaggctgaataggtgcctcagtggttaagagcactgcctgctcttccagaggacctggatctaattccttcaaccacaaggcaacttacaatcttctctgactccactctcagtggatccaacgtcctctctggtttcactgggctctatgcacacacatggttcacaggcatgcagacaaagcatttataaagaaagtaaataaataacagttattaaatgaaaataatgttttataattccaacacagagtcaggattattcaccacaaattttgtttcttggcaatgttttaaaaattgaaatttaatataaattacatgactgttgtagaaatgttaatagttggatttcatagggaaatttttgaggtatcttactaacaacatattaccattttgtcacaccctttaatcaatgtaattttttagactacttaaccttagtaagactcattagggctgctcatattaaattataatatagatgcttatatataatgtatatatattatcataatcaaacatacctgtatattcataggtaacatgcaggttctatgttagacatgtcatatattatgtgtactcttatgtaggtgtatctgtacactgtttatgtgtggttaaatatacaatgacaccatcaagtgtatcattcattagcagaaaagaacctattaaaactaaaagcaaaataaagataataattgttttcttcaagtgaaacctttaacactcctacagtttcttactagaaacctacccctctttatttatttatttatttattgcttcctccttgccaaattacaatcgtatcgcctaaatatgcctagttcaatgaagattaattatggtgacaattacattgctagtagattttctggtgtttcattctctatacacagagtagaagcagatttcaaagaaatatttctaaagatgttaactacaggattaaaaaatcaagaggcaatcaaagcatgcactttatcatcaattattgtgagtagtttcagaaaggagttacataaaaaatgttcttttgaaaatcattggcagtagacatttctgctacaaggtagagaactttgcatgtaaaatccattcagatcactccagaagatttcttagattgcttgttatcatccttaaaactcacccccaaatcacttttaaattattaaacagataaagagagtcatcttcagatttccgtcctgacttgagggtatatgacttatgcatcattatttgaatgacaacacatacaatgcctttttaatttttttttcagaatgaggcatttctttggttcttcaagagtaatagctgttaaattgacaatttaggaacattagaactcattgtactttacagtcatttaaaagaaaaaaaaaactttaaatattcagatgttcaactacatattcgctgacactaacatttgtcttcatttcagatttccagctgagaaccatcagtgtaatggctgaaagacattagctcagacagtgttccctaggctggggcatgcctttatcttccttaaccatttccttgaaacctttaggttcatattcttatttgggaccgatttttgaaagttccaagattttagataacacagactgaataaaaaaaaaagttaggctattggtatttagaaaaccgtattatggccagatactttaaaagatatgacaaagaaaaggaaaggatacaaaagataactgtatatatgttatatgacttcttgttcaagagtgtaacatttaaaacactattgagtatgaccagatgaaccaaatgcttttaaaattctcgtacttgaaaaagtaaaaaggagctactgtaaaaccacatcaacttcttaactactagtctttgatgaaaagttgaagataggtcagaagggatggctcagctcttgagagaatccactgctcttgcagagaacacaggatcaatacccagtgcctgcatggttcttcacaaacggtcactccatgtgccaggagcttcagcattctcttctgatgtctaagaacagtaaatacacatgtggtgcacatgcagacatgaaagcaaacactcagaaaataaataataataacgatgattaatacataaaggtggaggatatctctaaggtgaatcgattatcatttccaatcctaacataattaacaatcagtaattgtgattgtatgagaggaaaccactgatttgtttttagaatgaaagcaacctgggattttttttttaacacattagttatttccattcatagactcaggaacccagaagacagaaactctggacacacaccttcaaatattcatttacagttttttaaaatggttttagagctttattgtagacatacagagagaaagagagaaggtaaaaggaaagagaggggaatgccatggctacgtggagagacgggggagggggaggagggaagaagagctagaaatgagagtaagaaaggtgagagcttaagagagtcatttacagttttgataaaatgaatctcccattagaaagctcataaattacttgataacaaatgcagataataaggaattagggaggagtaccatacttctcgatggtcatcctgccatctataatcaatgtattatagttcattaaaacatggcttcctgtctctccttttttttttaaatctctcctatctctctccctgtctcaaccccctacttccttctccctcccatcctgttctcagtataattttaatgcatgtggttgactttaatgaaatatttgactggtatgtcacttgaagtttaatatacatcaaggtcttactatgaaatgctttgttatcctattatacatataaccatatttaatcacaaatttctgttcccagtgtaaagagtaacatctaatatatttcatttactgcactgtaactatttaactcgtccttagacacaggtgttacataaaatttctaccataatacaatattaacattttaaaatgtagtcggttagattgacattgattgatgagttactttcatagattatgcctctgtcctaaagtcgtttcattatttgaagaaataggtaacttcaactgagatggaaagaaattagatgcagcttgccacaaattattgtccaaggggatcagtattaaactcatcttggaaatgatgaacagttaaacccattaagtttcttgagtgacatactaaaatgtaacgatagggaaggctggaactgttaactgtattgatttcacatataatactggattttgaatatttgtgagtattactttttctcttcattgtagcttatatgcacatgtcatgaatgtgataccacataaactatgtttgaacatattttctagaaaagtacctaatataagcataattgttttgcattcattctcatgtatgtataaatatacacccataactaataagcgagaacatattatccacatatataactaataccacaattaaaaactaaaatactacaaattcttacaatttaatttgtggcaatactatgaaaaataaacacttaagactcatctgaatccctagtgacaccaggagaggagctactttaatctcattcagactatagattttttttgtctgttctctctgtagccctggctgttctggaactcactctgtagaccaggctgaccttgaactcagaaattcgcctgcctctgcttgccaagtgctgggattaaaggcgtgtgccaccactgcccggcccagagtatagaattttgatgagaactgttcttaattggttttaattttactatataaatatatagctatttaaggatctaatgttttaatatattagaatatctacgatattcttcccatgttataaaaccttcagttgtattttaaggtatagtaagatataagataatgtcttagcattgagacttcaccctagcaaagaaaatattctccattttcaggcagccagtgaaagaagtacttgaaacaaacactctgaatggtccttggcatttctggtgtctgttatatctgcttggaattctcctaaaagtccatgcccatgccttctgtgagtagagtccaatggccattagcaatgtagacaaatacaactgatgaataaatgagcgttggcactacccatggcaacttggtccaagttagagtagtaacagcctggtgttccgtaatcaacagcatttaataagcataaatatcaattacaaagcacaagggctcacacatattccacatattccaacattatgctcatcatgattctaaagacatcagtgatcagtggtattaaataatcaccggtattgtctaatcagtaaggactacaggacataatatgcttaggctattcaggaacgacagagttggtaattccaccagtaatcttatccatgtgaaataacattataaaacaatgcctgtgtcgaaagctttgtgcataacctgttgacacagtagttgcttcaattattagaaactttaggtagcgctttacatattttcactggaaatataatgacactaagtagcatcagctaaaaccagctggaggggacatatcgcttcattctcagggcttataaatgccagctgcatatacccctacagtgtatttctttatgatgccggctggaaatagctatgaatttggcatatcttattctccagtccccaagcctcaagattgtttggcttcccacaaagttgatgattgttttccatgagtgatatgtgggcgtgcaccttgttcctttcttgtccagcctctgatctgatgagaaggcttcccagcggtcaatatcagattctcatgtgcttcattcagggtgaaggagtgatccataacttctcatgccacagttagaatcccagcatgaggatagaagccattcttaacaccttttgtttctctgcgatgtttccacttaaagagtcagagtcaaagcaagtttgctaaaaaagaaacaaaaacccaacaaaacaaaacaaaaaacaaaaacaacaataacaacaaacatactcactaaagcattgaatgagtttgggttatatattaccaccccattgtgagacaactgaagaaaaactaactaaaatcagttcctcttctattctaatgcatacatgtcagtttcccaggttcctagatttattttgccctgggaaaccaagacagagagccatcaacatctgtctcaaaatattaagtattacatattcagcacatttcttagccaaatcacaaattaattgtagtgtttgtctctagtcttttactttcttcatttgaggaataacagattgtaactcagaaaggaaccctcttgaaatatttccatttattccaaacactagatgcaaaatcagatattggcttttacttacagagaaatgtgaaaatttgtgactcttcaaacaactgaacagaagggttttgattatagataattgttctttgctatctaatttcattagtaagcaaattacttatctttgattaagaaatggttatgagagaaaatggaaaagttaaactgaaaataaaatcgtttataaaatgttaaaggtaccagaatctgctacaagacaaatcactgaccttaaggtaatgagataaattatgcataagtgtgttgtttatttgatcaaacaaatcataatattaaaataataagtattgtattgcaattttttccttttggcagctattagcgatatatgtgcaaaagcctactagcagaattgaaacatttctatgttaaaagtttagattgagaatcttacttctttctgtcgttatcctaatcatttatactctggccagtctccttagatataaaatgaaataagtgaatcaatttctatactctattccttgagacaaaattgtttatagaagttttattattttactttcatgttatatactaacattgttatttcttgttatcctagaaatagtgcagattaattttttttgttccttgaactatacagagtaaatatttatttgtttagagagagcaagtatcttatctgtatcaatttcttttgcatacagtgcaagttccagggccagtagaaaacctgcatgctgtatctacctcacctacctcaattcttattacatgggaaccccctgcctatgcaaatggcccagtccaaggttacagattgttctgcactgaggtgtctacaggaaaagaacaggtgggtaagaaatgagcctcatgctatctatctccagcatgactctagagccaaagacaaaggttgctcaccagattctgatataactcctcatttagcatttctatcgagtaactgattgtttccaagtacttgttcctggaaattctaaaccatttcattgtattgtgctggtgatgtaaagaacaatggggtgaagttcattgggagaatctggttcaagtgttgactttagtagctcagaccaagatggataaccatatcctgtgcccagagatatttcttatcacgactcagtctgagaatgatctgtttgtatttagcggcattattcaagctgccctttccactctcagatagatgtagatgttttatagtgttctgtcttctctccacccttacactgtgaccatctatttcctggaactactctcagaagcatatactccccaatcacactggatttttatattttatctattgatttaatataaatctaaaaagagacatatgagtttttcaagaagaatagcagtaaataactcttcaaataaataagtaaaatgtaatagtgacatttgaccattaatgtatatagaatatgcatgactattgagatacttactcccaaattattacatttttaaaagagagagagagaaagagagagagagagagagagagagagagagagagagagagagagagagagagttaaaactaaagtacatgttaccaagcatagaatgattttttgtatttccatataaaatgtctgatcaggatttgtcttttgaaacaaatatgccagaaatttaagtagaaatattaaagatctacttcttagttattttttaagacagtattgcatgaattgcttttatgtaattagtaattctgctcttttttcttggctgttcccatctaacttttaactcttccttttaaccgttttcccatccaattttatacaagtctttctgtaggtcgcttcaataaacttaggagctatattgcccaatgttgataatgataatctgggtatcataatgtaaaactaaatgacagcaagtactggttctgattttttcaatgaccgtcacttttactaccttctctctgtagtttcaatctacaccccagcattttagggacataaagctagcagcaaattgtctgagagtttcagtatctgtggatatatttcttcatgcatgttacaatctgtgatttcttgacaaattatttaatttgggtcacttctattagtcagggttttgatgtgggtggaataatccatactacccagtgctctgggtggtttaaacaaattgaaacttaatgactataaaaaccacacgatgatgttttaacatggagtctgcagagtagtttagactttagtgggggagtgtctgactcaaaaaaggttttacagcaattcattaaagggctgaagtgtgcttctatgaatgagtgtctaacgttcaattcactgattgcacagaatggctgccatttctgctttaatgtgcttccttaataactattctggcattttatgtctccagaatatagaggttgatggactatcttataaactggaaggcctgaaaaaattcacggaatatactcttcgattcctagcttataatcgttatgggccaggagtatctactgatgatataacagttgttacactttcagacggtaagtgaggaacagtgaaattttactcatatatctgttgagaaatgaaaaaaaatgttgcatatgttattgattatgttgtaagggttttttgaaataatattcttttcaatagtatatcacaaataaaaaaacataggcaacttattcacactactgtactcaagtttaaatttatgattcagttgcatatattcagtcaggatggattaaaagataatccccaaaccagggctactgtgtaagagttcaaattattcttgtgcatgtatttgttcatttctatacattttacaaggtaagcacatttattagtgtgtggaataatatagatggtatgtttctttcatttatcatatttaaaagacacaaatgattaaaagtataaatgatggactatacagtttaattagcaaatatgcccaaaggatttttgttaagtaaacatgcacttgaaatattagaagtgagtttgaagatgcacaccttcatgttctcttgtctaacaaatgaagattagacatatttttcaaaggaagtaaaaggaggaagaattcataatgaagataatggatttaactgaacagtgttaggggaagctggttaccaaaagaataaatgataatgaaaacctgggaactttaataaatgttacaggcgagtgtatggtttggaatgggactatggagattcaggcaggtgcattgcagagatgtccccatgaatactaaaaagactaaagccagcttgaggcagcatagcttccctgttagtatgtttagttttataaattattgatattttgattaaaactgccttcaatttctgattcttgacctaacagtctttaatctgggaacgtattgacgtggctagcttacagaatgtcaatggcaagaagaaagacatggatgttttgaaggatattccaaagagaacacaggctaatgctcatttgcaatttcacttagaagggtattttaatgttaggccacttcagtattaattttaatgtaattcttctagccaactgtctgattctgttattcaagacagagcagaatatgcactggctgaataaattactttatagcttataattataaaaataaaagaaaaacaaatgaaaatgagtattttacataatttatgtagatttcattcacactctgaactgtaatactgcagtgttattcttccactttgattttaaatgtcataagtgagaaagatagattgttactcattagtccaagaattatcttctggaaatgcagcagtgcctagaaaattgtctgtcattgatgaagaaactctgtgactatcacctcaagtaaatgtagtttttggaaaattactaaattttctttattcgatgcatttgataagagaaatgagggattgtgggatactcctgtcgcaacctttaccttccgataaaacatgtgctgttggcttttgccttggcagtactgagttcccttctgtcagcttgaactcatgctttcttctctgctatcttctgaggccaaactctagaaaccaatacaaccaagcaaccaaccaaccaacaaacaaacaaacaaacaaaaaaggcagcgttttgtgataaatgcctcaaattagtatgtttgtaaagagtatacattaaacttcatgagtaagtttcgtcgatgagtatgtgaacatggctgcacgtatttctcagaaataaattcaaatacctgatttaatgccttaggcagtatggaatgggatctaccctcatcttaatacgtttaaagcagtctgctctaccatactgagaaaactctctgacatcttctcatcagcttaatgatgcactgtcagtgagttcttcacattttgaagataaacatttcctccctctgtacaaccatgaaagataaaattaggcatgggagtgtgtgttgtgctcacgtccattcagcatcaaatcctgtctattattggttggtaactgccatactgaagaataactctctacttggcctgcaaccagaacaaccagtatgttgtctgtggaaagtaagagagttttctattggagaaaattaacaaataaatcaacactacgaaaataaagatttttgagagttttgttatattatcagcatttaataaaaataattttgatgcttctaacattgtcattgtcttacatattgatttcctcagtttgtttttggtgtattagaaattggaagttagtgactattaaaaaaaatagtggtctgtgaacatgtcacatcacttacagacacagacccctaaccaaataaagaaatctcacagactttgtccttcctccaatattcagtcattagcatttgttacagattcaaattataactgagacagtttgctttaaaaagaaaatatgttgtaaaatgtttgtgatattatgtgagataaagggtatactctaagtttcaccaagggtaaaagttgaaattgtacttgggccataaataagttagttatgctctaacagtgactgttaacttaaaaagtcaacattattaacactggaagaagttaagacacacataatccactttacagaaactctaggtatgcaggcccaacaaagcatgctttactccccctctgtccgaaaccagtgaagttcaaggccaaatttaaatgatttagtaatgatgtttagatggtttccaagatgacaataaattaagtgctttaacagagtttgtagtattctgaggaagacttggcatactctacatagaatttatattggagtgaggataaaatttagttatacatactgattggtgaatgtagctttaagccttcctatacgtcctcaggggcagagaaactttaacaaggaccagataaactttgaatggaatgaaagttgtttagcttgaaacattaaaaaaaatagatagatagatagatagatagatagatagatagatagataagagtgcaaagtttgggaagccagttagcagtattagaacaggcctgttccactctgctgagtaaatgttacattgttaccagcaagtaaaaggaagatgaataacctatagaaagtatcagagaaggttcaaacaataggaaactcctactttcccaggcatgcttgactaagtgcccttagaagtagagtgtttctaagcttctgcctaagtgacagctcagagatgttgaaacaatcagttaggaagaaagataactgcagatcatggtctatgttggccacatgaaatgatttactctatttgggaggttatattttttatgatttttgaaattgattggtaagtttcttttagacatttttacctggtacaagtatttacatgaaaaatggggtaaaagaaaaaataaaataacttattaatacatcataacatttctgctaattaacttactatttcaactcatgcttcttggatttacacataagcttaacagtatccttcacattgatgattaaaattaaaatttagaaaacatttggacatgtgaacactatattccgtacttcattaaaagtcataatattaactaaaacggctgaggtgttccctagcttatggaatgatattaaagaataattagtgatttaattaacacatgactctgaaattttatcacagaatatattggctgcaacctttatcaaactctaataggttcaaatcaaaacaaaaattttcaatttccatcatgttcataaaattccaggaaccaatcctgaagtaggtcttcctttctcctctactcactgattccatgagtattaatcagttgtcaatttgagaaatatggaaattagtcaggaacataacgtgtcctgaaggtgaaaattttctagacaaaaaccaggataggacatacctaaattcaagtcaaaatactagtgccctattgaaaaaaaaaacaaacaagcaagcaagcaaaaacaaaaatctacaaacaccattcaatttatattaaaaagtatttacttgtgcagaatggcacagggacttgttaaaatgcatgagtagcccggtcttgtcacattcacagatgtgtcacaagtaaaaataagaacaattcatttaataaacattgacactatgaagtcattgaatactcttcctggtgctatgaagggcagggagctttgtttatttgcagttcaactctgagaactagaacatctcaggatgcatagcggctaggcagtcaatggttgccttcaaatttctcccatggctggagacatactctttgaatttagtaaatattcattacaactcccaaaagggagctgtgtatgtcccttctgacataaatatttttaaaaaattaaaataatttaacaaaataatttaatatgcaaaaataatgaagttgccagaaaattctgaataaaaattaaaacaggtcttttattaatagaatctatgggctaaactctattggggaacctgctagcttctacattatacaagtttaattataaacagattaacaaactaaagcaatttcctcccttttactctgtaggagataataatgattgcattataggaattgagcaacccaggtgtctatttctgatatattccaccataaaacaatgcagatccagaaaaatcacagcacaatatcattggaaaatctcccctgttttcataggttctaccaggagggtcatcacagagctgggattatatggtattatttgctaacctacctggtgctctttttaaaaataattttggggactcagtagatggttaactaactcaactagcccacgagacaaaaataagtgtttatttctcttctctctaagaatattgaaaagggccacctacttgcatcaacttaccgaattttcattatacaatttgaaaaagatagactttctctttgcatcagtgggctggagtttctttggcaaggctttggtagtaactgtcataccttatttcattcctttcagtgccaagtgctccacctcagaacatctcactggaagtggttaactcaagggtaagtcagccaatggatattgttttattccctattatggacatattctgtttaccatactgccaactaagtacaggtatgctctggaacaagggattttctttgactagagatacataaatagaaataaagaactttttttttctggaagcatatatgattttattggtattagagtgcttgatcaccattctaacaggacacaaggttatgtttcttatctatatctactaatagagacataaatctagtattccattgcactattttaattcagaaaaaagctaaggcaatattcagttcagtaatctttttttttcaatttaatcttttaattgaaattgtatacaatttattctgattgttgctttccttcccagaatttctcccataacctcccctcctccccacctccacaactatcctactcatgccttctctacctctccttagaaaagaaagatgcaaataaaaaactcaaacaaaccagaattaaatgggtaaataatacagtgaaaaagacataacacagagaaagacacagacacacacacacacataaaccaaacctgcaaaaaacaaaattaaaagctatagtatccaagcaaaagaagtgagggaaaaaaaagatatccaacaaaacaatatgagacaaaaatatctataataacatattttttttattcctgtagcatgagctacaaatattgtttacacacccagtaagagttctgcggaagaaacttttttttcttgacaagcagttgtctattggagatagcttcttacttggcatcaagaccttatgtttactttccagtctcagaattggatccattttaaatttggacctatccagaccccatacaagatgccacagtctctgtgagtttgtatgtgtgtcagtcctcttagatctgaaagacactatctcctacaagctctttacctcctgaatagctctttgaatcttgaagggagggatttgatgaatgatctcgcagcctctgtgtgttgtctagttgtaagtctctgtattatttcctttctcctaacagagaacgcttctctgataatatctgagtgaatgactaatctatatgtgaatgactgaccttttagtatcagaaggtccttagaagccattttgttgctatgttcttttatcaggataatagtatttgagtttcttctacatccatgacctatctagtctcagattcttggacacctgagtaatgaggatcagaaatgggtttcatatcatagagtgggccttaaggcnnnnnnnnnnnnnnnnnnnncatatcatagagtgggccttaagtccaatcatgaaatggttagttgtttcacatttgtgtcactactgcagcagtgtctccttcaagtaggtcacaattttagataaaagggtttagatcagaatgagcatttatcttttttctatgttaatgaagcagagtacctaccagcatcatggaaactatatactataggtcatggatgtagaagaaactcaaatactataaactatatactaataatagtaattagataaaacaatatatatatattttagaacgcaatagctttgacagtaccatagtctgagttattatactgttccataggaccctttttgtccactcaattgtatgtaacttagcctaggcactggaagttatcacttggggcttttttccctaccttatttgatgatttcatttaaatttctttcatatatgtatttatttttggaagtttctaacagtactagtttattatatgatgcctcaaataaccttcagtgttaactgttctttcacatattctctcttgtaactctctcttctctcctcttcttcatgcaatcctcgtattcccagctccccatttctctctaattatatttctatttctccctttttgagtgacccttcactctcttttagtcctgtattttattcctaatttctgtggtaattcagactaactaacaaaggtttacagctcatatccacatataagagaataacactatatttgttattttgggtctgggttaatctctcttaggatatttattttcttagtttaatctatttccctgagaactttatgattttcttaagagctaaataataatcccattgtgtaagtgcaccaaattttccttatccatttgtctattgatgaatatcttggctgtttccaatttctggatattatgaatatggcagcaaggaacatggctgagtaagtgactctctagtagaatgtagcatctttgggtataagtccaagagttttatagctggttccaatgtattcccagcttcccaaggaatccccgtactgatttctatagtcactgcaaaagtttacacttccactagtaatggatgagtgttcttcttaccccacacacttgttagtatgagcaaaatggttttgaagaacttcttagatgaaatgtatatttatgtactttaaaccttcctgattctgtctcctatttttaaccttcttccacacactctcacaaattcacaatctcttctttaattatttctctctgcgtgaatacatatatgttcatatatccaagattaaccactagagatcaaatatcatgtgcaagaattggttcatttccacagatcaatgtgcaattcaacctttcagcacaacgctaagaattatataataatgagcagaaagattttaacagctacacagccaggacttattttgctagatagtgtcccctaggcacaacaaaggaaatgtacacatgaaatttcaacagttatggttgccagaccaagaccaatattatgacaattattgatgttacattgtattcaggagaaactgcacatggtgccacactagatgaaaaactaaaagttgccaattaatggggaatccaggagtttttataaagttcccacagttatccttatgatgtctattataaatttcagtgcttttcagtcatgttttgccagtgtgaacttctgattcatgcacatggaacttagcaaagacttgatagaatcctctcattattcatatatcatacaccatatatatttttgaggactacttttacattaagatttgatacgaaggagaggtgtctgtctggcccgggatggctttgcaggagcatacgcgggagcaatcttccttcccagatccggccaagactaatctgcacaggtgagagtggactacagaagctaacagcttctgggtcaggcaggggccacagagcttctaaggcaggccccatttcgggctccagacatccgggcaccttctctgccagaggagaggtgtccaccccgcctaggaggactttgcaggagcatctacaggagccatcttccttcccagatccctccaagactagtctgctcaggtgagagtgtggactacagaagctaacagcttctgggacaggccctgtttcgggtcttcatcttctgccaggaggcaaacccgaacaacagatatctgtgcaccttctctgcgagaggagagcttgcctgcagagaatgctctaaccattttaactcaggagagagctagtctcccgggtctgctggtagaggctaacagaatcactaaaggaacaagctctaaccagagacaactataacaactgactccagagattaccagatggcgaaaggcaaacataagaatcttactaaaagaaaccaagaacactcaccatcatcagaacccagcactcccacctcagccagtcctgggtaccccaacacacccgaaaagttagacccaaatttaaaggcatatctcatgatgatggtagagtacatcaagaaggactttaataactcacttaaagaaatacagaacactgctaaagagttacaagtccttaaagaaaaagaggaaaacacaccaaacaggtgatggaaatgaacaaaaccatagtagacctaaaaagggaagtggacacaataaagaaaacccaaagtgaggcaaagctggaaatagaaaacctaggaaagaaatctggaaccatagatgtgagcatcagcaacagaatacaagagacagaaaagagaagctcagatgcagaagattccatagagaacatcagcacaacaatcaaagacaatgcaaaatgcaaaaagatcctaactcaaaacatccaggaaatccaggacacaatgagaaaaccaaacctaagcataataggataataggagtagatgagaatgaagatttttcaaattaaagggccagcaaatatcttcaacaaaattatagaagaaaacttcccaaacttaaagaaagagatgcccatgaacatacaagaagccttcagaactccaaatagactggaccagaaaagaaattcctcccaacacataataatcagaacaacaaatgcactaaataaagatagaatattaaaagcagtaaggggaaaaggtcaagtacatataaaggcaggcctatcagaattacaccatatttttcaccagagactatgaaagccagaagatcatggacagatgttatacacacactaagagaacacaaatgccagcccagactactatacccagccaaactttcaattaccatagatggagaaaccaaagtattccacgacaaaaccaaaatcatacattatctttccacgaattcagcccttcaaaggataattaaaaaaaaaacaaaaacaaacaaacaaacaaaaaaacaaaacaaaaaatacaaggacggaaaccatgtcctagaaaaagcaagaaagtaatccttcaacaaacctaaaaaaagacagccacaagaacagaatgtcaactttaacaacaaattaatatgaagcaacaattatttttccttaatatctcttaatatcaatggactcaactccccaataaaaagacatagactcacagactggctacacaaacaggatccaacattctgctgtttacaagaaacccatctcagggaaagagacagacactacctcagaatgaaaggctggaaaacaattttccaagcaaatggtctgaaggaacaagctggagtagccattctaatatctaataaaattgacttccaacccaaagtcatcaaaaaagacaaggaggggcacttcatagtcatcaaaggtaaaatcttccaagataaactctcaattctgaatatctatgctccaaatacaagggcagccacattcattaaagaaactttagtaaagctcaaagcatacattacacctcacacaatactagtgggagacttcaacacaccactttcatcaatggacagatcatggaaacagaaactaaacagggacacagtgaaactaacagaagttatgaaacaaatgaatttaatagatatctacagaacattttatcctaaaacaaaaggatataccttcttctcagcacctcatggtactttctccaaaattgaccataaaattggtcacaaaacagtcctcaacatatacaaaaatattgaaattgttccaggcatcctatcagatcaccatggactaaggctgatcttcaataacaacataaataatagaaagtcaacattcacatggaaactgaacaacattcttctcaatgataccttggtcaaggaaggaataaagaaagaaattaaggactttttggagtttaatgaaaatgaagccagaacatattcaaacttatggaacacagtgaaagcatttctaagaggaaaactcatagctctgagtgcctccaaaaagaaactagagagagaccgcacactagcagcttgacaacacacctaaaagctctagtacaaaaggaagcatattcacccaagaggagtagacagcaggaaacaatcaaactcaggggtgaaattaaccaattggaaacaagaagaacttattcaaagaatcaaccaaacgaggagctagttctttgagaaaatcaacaagatagataaacccttagccagactcactaaagggcaatgggatagcatcctaattaacaaaatcagaaatgaaaagggagacataacaacagatcttgaagaaatccaaatcaccatcagatccttctacgaaagactatactcaacaaaattggagaacctggatgaaatggacgaatttctagacaaataccaggtaccaaagttaaatcaggatcaggttaatgatctaaatagtcctatgtctcctaaagaattagaagcagtcattaataatctcccaaccaaagaaagcccaggaccagatgggtttagtgcagagttctatcagaccttcaaagaagatctaattccagttcttcacaaactattccacaaaatggaagcagaatgtattctactcaactcattctatgtagccacaattactctgttacctaaaccacagaaagacccaacaaagatagagaacttcagaccaatttcccttatgaatatcgatgcaaaaatcctcaataaagttcttgctaactgaatccaaaaacacatcaaaacaatcatccatcctgaccaagtaagtttcattccagtgatgcagggatggtttaatatatggaaatccatcaaccttatccattatataaacaaactcaaagacaaaaaccacatgatcatctcagagaaagcatttgacaaaatccaacaaattcatgataaaagccttggaaagatcaggaattcaaggcctatacctaaacataataaaagcaatctaaagcaaacaagtagtcaacaacaaagtaaatggtgagaaactggaagcaatcccactaaaatcagggactagacaagtcttcccattttctccctacctattcaacattgtacttgaagtcctagccagagcaattcgagaacaaaaggagatcaaggggatacaaattggaaaggaagaagtcaaaatatcattttttttgcagatgatataatagtatatatgtgaccctaaaaattccaccagagaactcctaaacatgataaacagcttcagtgaagtagctggatataaaattaactcaaacaaatcaatggcctttctctacacaaaggataaacaggcagagaaagaaattagggaaacaacagcattctcaatagtcacaaataatataaaataccttggcatgactctaaggaagtgaaagatctgtatgataagaactttaagtctctaaagaaagaaattaaataagatctcagaagatggaaagatctcccatgctcatggattggcaggatcaatatagtaaaaatggctatcttgccaaatgcaatctacagattcaatgcaatccccatcaaaattcttcaatgaattggaaaaggcaatctccaaattcatctgccataacataaaacctaggatagcaaaaactcttctcaaggataaaagaacctctggtggaatcaccatacctgacctaaagctgtacttcagagcaattgcgataaataaaactgcatggtactggtatagcgacagacaagtagaccaatggaatagaattgaagacccagaaatgaacccacacacctatggtcaattgatctttgacaagggagctaaaaccttccagtggaaaaaaagacagcattttcaacaaatggtgctggcacaactggcagttatcatgtagaagaatgtgaattgatccatgcctatctccttgcactaaggtcaaatctaagtggattaaggagctccacataaaaccagagacactgaaacttatagaggagaaagtggggaaaagcctcgaagatatgggcactgggggaaaattcctgaatagaacagcaatggattgtgctgtaagatcgagaatcaacaaatgggacctcataaaattgcaaagcttctgtaaggcaaaagacaccatcaataagacaaaaagggcaccaacagattgggaaaggatctttacctatcctaaatcagataggggactaacatccaatatatataaagaactcaagaaggtggactccagaaaatcaaataaccccattaaaaatggggctcagagctaaacaaagaattctcacctgaggaataccaaatggctgagaagcacctgaaaaaatgtccagcatccttaataatcagggaaatgcaaatcaaaacaaccctgagattccacctcacaccagtcagtcagaatggctaagatcaaaaattcaggtgacagcagatgctggagaggatatggaaaaaaggggaacactcatccattgttggtggggttgcaagcttgtacaaccactctggaaatcaatctggcagttcctcagaaaattggacatagtactaccggagtatccagcaatacctcttctgggcatatatccagaagatgttccaaccagtaagaaggacacatgctccactatgttcatagcagccttatttataatagccataagctggaaagaacccagatgcccctcaacagaggaatggatacaggaaatgtggtacatttacacaatggagtactactcagctattaaaaagaataaatttatgaaattcctaggcaaatggatggacctggagggcatcatcctgagtgacgtaactcaatcacaaaagaactcatatgatatgtattcactgataatatcagtggatattagcctagaaacttagaatacccaagatacaagatacaatttgcaaaacacatgaagctcgggaagaacgaagaccaaggcatggatactttgccctgtcttggaattgggagtaaggcacccatggaaggagctacagagacagattttggagctgagatgaaaggatggaccatctagaggctgccatatgtggagatccatcccataatcagcctccaaacgctgacaccattgcatacactagcaagattttgctgaaaggaccctgatatagctgtctcatgtgagactatgccgggcctagcaaacacagaagtggatgctcacagtcagctattggatggatcacagggccccaaatggaggagctggaggaagtacccaggaagctggggggatctgcaaccctataggtggaacaacaatattaactacccagtaccccccagagctcgtgtctctagctgcatatgtatcagaagttggcctggtcggccatcagtggaaagagaggcccattggtcgtgcaaactttatatgcctcagtacaagggaacgccagggccaagaggtaggagtgggtgggtgggggactgggtgtgggagggtgtgggggacttttgggatagcattggaaatgtaaatgaaataaatacccaataataaaaaaacaaaaagaaaaccaagaaaatacccagaaggtaaatatatcaaattaaaatttcttcctatgggggggacaaagatttgatacattttgggtcttttcaaattcattgcaaccgttgctatttagtatatatatatatatatatatatatatatatatatatatatatatatacagagtattttgacaaagagattaaatatataacagaaccatttccattagagttttgacttcattctcttatcacatgtaatttaaacttcatcatacatatttttaatgttcccatttcaggttagctctgcagtcagagcttgctttagcctttccatgaggtttaatgagatttccttcaagtcattcatttttgaaaagagggagctttaataataggcttaaattaaatgaacctaggtctagtgataaggtctctgattttaatttagctcatggaagttgcccttatagttggaatggttgattagtcagagaacatgaataggttcaatcctgccagtaggtgaaggcactatgtgatttgattttagagattgtaaaatgttcacatataaaaatattcactggtataggtttaaatatgtttaaactatataaatgcaattattttaatgtgagataacacactgataagactaattggattcaacattatttatcacacttaatgagcaataaacagtggaagtcactaaagtacagcctgtattttgtgcctggaaatgtgcttaacaattcagctataatttcatttatgtgttataattctgtaagtgctgctcataaaatgaattacagtaatattaactctgagcttttaagaaacgcaataaaacaccattatttcctagggtttatttatatttcatgaactataatcgaatagtaaacaatttaaaatttcaccttgagagtggtacattctttgaaaaaattaggcacaccaacatgatagtgaatgtgtttaaggacatagaaagagatgacacaggagctaagagcagtcgagaggcagctagcttagtggaagctcaaagtaatacaatgctagcaaatctagctcctagtgaaaatgctttgaagacaaaatttgacacaaattatacagtgagattggtcatctacaaagagaaagtgtgggaaaaagaggaaatattgccttacattagctagtagtacaataggttaacccttccatgtgcagatgatagatataggtaagtattggcaattaaaaactgccatgggaaggagatacaaatagacataatgctgagagctgagagacagaacagaatgaatgttggtttgagattgtttttctttttttagtttaattttatttttaatttctttttatactccatattccatccccctcccggtccccccctgtttgagagatctcgggagtccagattatttgagacagctggtactcctacagaatcacccttctcctcagcttctttcagccttccctaattcaacaacaggggccagctgcttctgtccattggttgggggcaaatatctgtgtctgactcatccagctgcttgttgggtctttcggagggcagtcatgatagatgcctttttgtgagtgctccatagcctcagtaattgtgtcaggccttaggactccccccccgcccccttgagctgaattccactttgggcctgtcgctggacctgcttttcctcaggctcttctccatttccatccctgcagttctttcagataggaacaattatgggtcagagatgagactgtgggatggcaaccccatccctcacttgatgccctgtcttcctgctggcgatggactttgaaaattccctctccctactgtccggcatttcatctgaggtccctccctttgagtcctgggagtctctcacctcccaggtcctgagaatgtttttcttataagtggagggaaaaacgtttgatactacgtaaaagggaattaaatgttcaagaggaattttactgccttgataattttggttgttttcattacaaaattgtgagatattacaatttctagaaataactcagagggaaaatttaaccatgtagaaaatagaatgagagaatacaggtatgtaattctatcagtaggcaagatgtcacaggacctagtaaataaagaaaggcacagtttagtcttgctaagtggaacctgatcagagaggatagtagattctagtcttttggaagctgaaaagatagccagtccagaaaatgtcatcattacagtataatggcttgtacaagaaattagtaaccatgtgaagatgggaagagagtgtctgtggttatccaaccttatattgatcaatgctaacatttgtatgcttctgtaattcttaggcaaaacagatcaagcatttgagactatgctcatatttaaagtgaaagaacaccacaattctatttattcttctttccatgaccagctacttcattgctgctatggtgttgtcaaagaattgatgaagtttgggggagggtggataatttgctgggaaaaagaacaagagcattagaaggtttggaaaccaaggaggctcattctcttagtttatcttttgctcttgggaaatactacacatgagcaacataaaagaggaagggtgattttgctcacacgtccatgtgtatgttatagagcggcagtacagtaacaggcaaactggcacatgtcagaagtagccatgtttcatgcacagtcaagagcagagagctgcaggttagcatctattctagaactagcttgctctatttttcattccgtccaaatctcgggcctgtaatatagtgtttgtggcattcagtatgagttttcctaccataagaaaccaattaagaaaatatttcacagacatagccccagtccaacgtattctaggcagtccctcattcagattcccatcccaggtggctctacagtataatcatcaggtcaacaataaaaacaaacaaacaaaacaaaacaaaacaaaaaaacccaaaaacaaaaacctaaccatcacaatcatggtctttaaaatgtctaagaagttcaaatgaggtagaggcatacttggaagatgacagagaatgagaaatggtaaggtcaatgaattattttattactgctactttccaaagtatccttaatcttataaaagttatattcccaggacgacacaaagaagtgacactgtgacttgataataggctatggctgttgatgaattgacttcactacatcttggtgctaattttcatgccaaggggaaagatattaaggaaaaaaaaatttaaaaatcaaaataaatcttacattcaagtggtttctaatctctgtggagttaggtcccaggcagaaaactagctttagaataatgcccaggacacaagcttacccatcctggaagtattaggaatgtgtttaggtgctagaggataaggcagatagaggtgtgctaggaaaaagcgagagtgaagaaaagatcctgttgcttgggatggaaaatgtagtgtcctattctggctcatgacttgaatatctggtcctaagtggggccttagatagaactaatttttatagttctagaaaacagaggtagaacaaggctgaatgaagtaggtaggacctttgtgtgtgtgtttgtgtgtgtgtgtgtgtgtgtgtgtgtgtatgtgtgtgtgtttgtgagtgtgtttgtgtgtgatctcttgatccattctatatttgtctctagttcagctctcctcctccccatgttgtatatgcaatggcgttctgctaaggcattggtatactgaaccctctgaaactgtaaatcaaaatataaaattcctctacccaatgcctggtattttgtcataaataacagaaaagtaacaaacacacctacattattacttttcccaaaatgaacctttttggaagattctgtatctcaaaaaatgtatgtatttctctcaaaaataaaataaaattggaagaactgcaatttgtcaagcgaccaaagctgatacctcagtaaaccttaggaaactaacttgaaatcttggggcatttccaaatctaattatttttttctaaatctaaagttatagaatgcatttgttattgaaagttttcaggcaaaaattggaatttcaaaaacgagccattatcttagcccccaaggttggctggcaatcaaataaagcctctaattatcgagcagcactgttctggaaccatgtggaaatagatgctaaacacacagcaaatgcaaatcataatttgaggtacacattgtctaataaaatattattaatttaaataagaaacaaagctaagcctgggttatataaattggatgattatagaagaaatgttgtcagataataatgtacctgtctaaatgtgagagttccctaaggtatagcttccattgtaacaaaacttgatatttataactctttccctgagtcttctttggttttttttttaatatttttattaggtattttcctcatttacatttccaatgctatcccaaaagtcccccatatcctcccccccccactcccgtacccacgcactgagtcttctaagtttaatctccttaaaaaaaaaaaaaagcactatggtacatgcaaagttggtgcaaagatgattgttatgacattgagaacagactggattaagatttcaggagtttgagatctcccattcataatgagttacaggacatctgtgttctagagtggtacattatctcagaacccgaatccaaacaaaccaaaccaaaaaggacccctgcttcacttaatctgcttgaattctaaatttcatttcatgcagagataatattgtgtttactttgcttatatgctgttttaccacgcagaacctgatggccttttccaagttgtctgaactgtctgtctttccactggaaagctcttcaaatgagactgagacagtccatctgctcttctcatcaagtttcccaaacacctttcctcaaatgctcttatgattccaactgagttttcctgatacactgaacattttgtaggtgttggtactctgtctggactccaccatcacagttacctggcaacagccagttaaacttggcccactctaaaaggggcctcttgctcccccctcactctcttacttattcttgcctcttacttttgccttttgcccccttgctctccctctctctcccttcccttcccccttttctccacgtggtcatggcaggcctagacttctctactctcttcctctctctgtttttctctgcctctactaccctcttaactcctctccccatgccctaaataaactctattctatactatactgtcattgtgtggctggtcccttagggcgaagggatgccttggcatgggcacaccaagacatcccctttccgcacacttcaccatatccccataaagcacatattaatactgctttatctttttataatcacaacagtagggatgggtattatattttacacttaacaattcactatttcaggagaccaatgatcacattgcatatctcatattaatgcaatgaggaagaattcatttttttctttttttaaaataatttttattacatattttcctcaattacatttccaatgctatcccaaaagtccccccataccccccccccacttccttacccacccattcccatttttttggccctggtgttcccctgtactggggcatatacatttttatctgttcaaaatacttaagtatgctttctagattaagtcatagcaacattttttcttctgttttgttttttcactgttttttttccacattgtacctcaatttccacccctgtaagcatttctcaaccatcagaaaatcaacttgacagaccattttgcaatttcactgaggcagtagccattaaaagagattgttttctattttatttttacatcaataagttgaagaggtatatacaataaggattgctgtgtaagcaaagacatcatgaatatatatatatatatatatatatatatatatatataatattttttaattgcttctctgccattcaagatttttttgttgttgagaattctctgcttagtaatgtgccttttttttttaattgggttatttggcttgttggccttcctgctcatatgtagcagatatgtagcttgaccttcttgtgggtcctgaacaactggagggggctatctcagaaactgttggctatctgtgggaaatgctctacttgatgggctaccttgtctggccacagtggtagagtggaacctagccacgctaagagattgaaatacaagggtggggtgggtaggggatacttatgggatccccaactgctttgaagagaatgggagggggaaggattgtgggagggagctatgggaaggggtcaatgagcaggatgtaaagtgagtaagtaaaaaaatataattaagagagagagagagagagagagagagagagaaactaaccaagctataagcaggaagccagtaagcagcactccacatgggctttggaactcctagcttctggttcctgctgtttgaattcctgtcctgacttctctcagtgatgggctgtgatgtggatctctaagcagcaacaaaccctttcctcctcacattgtttttgtctaggtgatttatcacagcaatagaaacccttaaggaggcataagtttatcaaataatatgcctcttactagatcagtggttctgtgtttttatttaaaattttctaaattttattttaatttgaaagttttatcagagaatagaaaattaattaaaaggtagtttctgatatacacttaggttaatgatttcatggacttactgatttgtgtgttcattttgttcttgtttaatgaatgtgcatacagcactccccattacttagctctacctttttaatataggacttactacattacttgctggtcacactttcatgaaagcagccattagtgtgaaagaaaggaatgacagtgcctggaactgagcaacttctacaaaagcaattagttcatttcctgcaataaaggaagaagtcgtgtgttgcctgcctactttttttagagaagcctggtgctttttcattacacttaacttcaatgtaatttagtcaaggttgttttaatttgtgaaaaatgggtcagtgagcctgattctcagctgtaggtaactctaaaactattcgccatctggactatcctgtactttagctgacattagctgagttggcagaaccgtgagccaccagctctattttgaaaaaacagatctggggtgagcagaactgaagtggtcaaacatcaaagaacatgccatcctttaaaagatgaccttggttaaaattgcctttcccctgcacccacgaacacactcatgactctgccacttccccatccaagaaatttgttttgtcaaatatcagcataaatgggatagcggtagatgttttacaaatccttctatctctcatggactccacagctttcatgtctttaatatgttaaatctgatctttgtataaacagtaaagacaaaaatacaaccattgttcaccttgggacaagggcactactatattgcaatcatcctgtactggttcataagaaatagcttaaagtattagaagtctctgaaatacagccaatctttaaacaaagacataattaaaataattacataaactcatatttaaatgatgttgaacaaatttatatgctaaacctaccattttatcataatgtcattacagtctaatagtatctctgcttgtagggatatttatattttatgtgcatgttaggaatacagtgcacttgtccccaattcttctttcagggacatcatgctataagcttgaaaatggccttgtagtgaatgttacaccactaaattcaacaaatgcaacatcatgagccttttcctcccagaccaagtttttatttacttttcaaaaatgtcccacaagggggagttcaaggaatgtcaatatcttagccttgaccttagttctcttgatagactgagagaccttcatgagacaatctatattttctgtctgtttgtggtttatttattaaagaaaatgagcactagactgattacattgcatctacagacataaaatggttaagggaaatcaagaggaagaaatgaagagaaatgttctactatatcatgagcacataaatcatagaagtaaaaatgttttggatgcttagtctcccaagtgcaagtcctgggactctctctctctctctctctctccctctctctctctctgtctgtctctctctcatctctctgtctctgtttctgtctatccctgcctcaaaagcttctacctcttcagtgttgaataataagcacctctgtgacataaagacatcttcttacataataaaactgcaattgacattagctctagcaaatatatttataggtgtttttcctgcctattgttgttcctaaactgtacttttgggttgaacactaacatataattttgtttgtctgtaaagtagaagaatttctcagtgcctttaataatacctttataatgaataggaataatttcattagcaagagattattttacttgtaaaatgaatgatttaaaatttttcaatttatattgaatatagtttattctttatgtgacgcaagctatataattttacatgatgtgcaatcttttgtctcttgtttcaatgtgtattcattccttcatttcatttcatttattcatctgttaaaaactcattatgtatatattattaaaaattagatgtttgaatctccataatacaccctataattaaataccctgatgtttagataaatcaaatgaactagctaaaataacataaacaaataatctgtgcattttattgctttatataaataaagagatgaaattttaccttaatattcacttaaaatgacacaatacttaagtattctgcatagaaaatgtccctgtggaaaatcagacaaaaggtgtaattttcaatcatttgtctgatttcttgatataaatgccattaaatttatattaatgagtttaatgagttttggaaatatttgtgcctaggatataatgcagtataagatctaccttatagcactatgaaaaaaatttagactcggatattatttttgacacacattttctacatcaattttggtagaatcacattttttttttcaagacagggtttctctatgtactcctggctgtcctggaactcactctgtagaccaggcctcaaattcagaaatctgtcagcctctgcctccgaagtgctggaattaaaggcgtgtgccaccactgcctggctctaaaaccacaattataaatttagagtacttacccctttgttgagggcatatatatcaagaaatttactatagaatacaacgttaccaaatgatggacacgtaagtcagatgttaccgagaagaaaacatccttattccctgacatgttggtcttgtgacgttgatgttcccatcagtagccaaagggataagcatccatcgtgctatcacagcacattgattcaaagtataagaacacctttgctagcacactattcttagaaaatgtatttctcactaggtcacttgtgtttagaatgagtcttagtgactttatactccataatgaacccatgattaaagaaatttattattgtaatacatgtattatatatgtatgcatttgagggtatgagacagacattaataatacgagaataaaacaacagagagccttggcctgtgcttgcaaagaattgtgcttaaccattaggcaggtgtgagcaatgtgctttcttaaaagactgaagacacgtttcagtttagtgccctatacttgacgaactgattactaagtcacaaccaaaaaagtaacacttgtgtattgactagtcttttaaaaatgtatgataattgcataaaagctatttaatcctcaaatggcaggtgaatcatctaaccaacattatcagtttacttcatatttttctcagcttagagtccccactatctcaaacagttaaaataaacagaacaattaagatatttcccttcagaggtacataaaatgtaggccatgtgctatgaaaccctcttctctggtcagacatctcatatcactttttttctactcctatttgaacaaattattttcccctcaaaagtagctgttttgttacatatatgtctaacttgcagaatttatactcaaaaatgtattcttttatagcatctactctttgccagtcattatatctccaggggctataaataagagcagactgtgagaattttaaagcataggtctgatgacttgaagatgtcaagcccccttccttctatcaatgtttttctacaagttaaatattctgagcttccacaaatatttctcgtgtgcttgtcagctccctacttgatatgtcatcctctctgctcagtttagaggtctcatgtgattctgagacaagccccaagggctccttcctcatttaaatacttcattattattcacataacctccaattgcattaatagtgagagtggacacattatcttactctatgagcatcttaaactgttcaagaataattctgaccgtcgctgagtcctttactatatttacgttaagctttaccatatattcagtatagctttatggcattttgtggcatattacttttcagtaggctcattcccataccctctcatggtcccttagaaatcttatggactcattcaacaccaatatataggagctgattacattcctgttatttcagacaatggaaaagttacaatttttgacccagctatttaatgcaatgtgcaatgatcttccttcaaacgcaatctccattgaaaagatttgcactacaatcattaagttccttacttttcccagatctctgatcttcaattctcaagaatggatacagttcacaaacattttcattctaattgtttcacttatatttcaagtttccttatttcagatgggttcccaaactagactctttgttaactgtgtggctacttgtacccagacctcgaaaatattttcattttgtttactaattttgtaaggacattcccatttgtcattgattaatcttgtgtattgagctgactgaaagtcaggctggctgagaatatgaggtaaacaccagcaataagtgaaatttctatagatgaccctaaagaaacatctacagcttccattgctttaacatctccatttcttttcatatgaaatcaaaataggtcccgtcttatctatatagtcccctgtgacactcacgtaaataatcaagtgctcattctccaaatcaaaactcctgttttgcttgtatgaaaaaaacaaaaaacaaaaacaaatacaaaacaaagcaaaaaacaacaaaacatgtagtatgcaatgataaagagttttctgacctagatcattgcttctaaaataaaaccacatcaccagacgcttccaacatgtatacttaaggactatgatggtgagttcttttaataattatttcagcttttcattgcacctgactccctgaagtttcccatcaatgaattggccagcttcggaataaaaccacagcaaagggagttgagaagacctgttttcttcccaattcacttattgatttttttcccttgacccaaacttgatctcaattaaaactctcttgagataccttgtttttctgactgaatgtttattatgaacactcatgatagaaaatactttcgggtgtcaatccaaaagcacatcacacacatgaaggatgcatggcatccatcttaatagtgcagagagaaattgcaactgcacaagtgtgtgtacagacatgtgtatgtctctctcacacacatacacacacacacacacacacagacacacagacacacacacagacacacagacacacacagacacacacagacacacagacacacacacacacacacacacacagacacacacacacgaaagatgcatgtcatccatcttgatagggttaaaatgtacttaacccgtcagcccttttttcttcctcaaaatgtcaaatatgaaacaagtcctgcccagttattttacacaaatcaaaagctattgatctggatacactattctccagaaaattgtttagtgtaatatactttaccaacttaagcaaaacccagctcagctagtgtgttttgaagatcacataaaatgtacaggtaaataaagttcctcggggaccttgaggtatatctgaaggccatactccaaatctcttcataagctactctgctctctcctttctgtgcagagagaaatcacactgcataaatgtgtgtacagacatgtgcatgtctctctctctctctctctctctctctctctttctcacacacacacacacacacacacacacactggtggtttgacctcgcctttaattcctgactctctagagaacacaatgattttgttccatcatgattgcttcaaagctgaagctcttgagagtcggatggtatgttcttcctttccctttttccttccttataaatatattcattttttatttatacaaggcaaatacatgtaacaaagggagagtcacataatttttgtttgacaaacctttttcaaatgaggaaggatgccctctagatagccaatttccattctttttattctaatgctaatgatgttatttaaagttattggatgcacagcatcaaatgacattacttcaaatgacttcatgacacagggagaatattgtagaaggaatatcaaatagaggttctcaagtgtttcaacctttaaaatgcaaaggaagaaatgcaattactatttattatttagttacctaatgcctgcccatcatgtctttttgaatttggcccagtaacttataattaaaagaatgattatccctgctggatatgggcacagattcacattatttccttggaatcctgtctgctgtctggctttaatgaaaatttaaacctcttagaatgacatgtggtacctgggattatttttcctttgtctgagcagagttacaaggggaaagaactttaaaaaaatgtcactgctccttcttacagattcttatctttcaatccttcattttcttgttggaaggatcgacaaagtatgaaagcatataaaatgatgagaatcttaacccagtagagaagaaatgaaatttctatactctttttttttctttgctttcaaccaagacaagtttatcttttgatataattggaagcttttaaattttatgaagtcagagtttccatttttttattatacttactatctcttcccatttatttacaaaagcttgctttattgtaaggtatagtacaattctggcaggtgtaccagcctttacatttagtcctgtgatctaacctaattaatttctgcacatggtataaataaaggacaaaaatatctacaagtagttttagcggtatttattaaagtatttattaaaataattttccgttattgaatgatttaataactcacataaaatcagtagaccatataaaggtttgtgctatttctgtgatttattcccttccgctggtcctatgctaatacccgtgtgtcctgttctctgtagctacaccacataaccaggtaatccagaataaacatcctggatgtgaagatgcactattctcaaaactgtgaagctgtttaaatactggaattatgcctcaacaatcaaacattgcatgtggtcttaagtacttggtcaacattcaagaacactaacatattatagaaatttgagttcaagaaatgtgtatgacacacaagatgaattgtacttgaaatttatactttgatttggaacccaaccctaagatatcacattatatataatgaaagatttcaaccctaaggtatcacattatatataatgaaagatttcaaactccacaaagaaaaaaatcaaagcacaaacaaatgccttcatctaaaacaattcattttctacacacttcaaaaaagagttctcaacctgtacaaatccttcatttttatttagtttcaagcttgaacattgctactgataatgcactatgatccattattctctgtgcctataaaaattaaaatatgtgaatgattggcagagagtagaaaagcagaaagaatatttagtgtatttatgcttgagatatttttggttttctctgtctttttatttgtttgcttgtttcttttattttgtacttgcatatgcatacaaagccaggcaagggcaatgggtatcttactcttatctcaccctctgcattctacccttgaggcagtagatatcattgaactgagattaccagcaagcctcagttatccatagggccttgtgttgcctccccggacctggggttgtagctgtgtcaggccagacagacttttgacagaggtttctcaggttgttatttacacaaaaatattacatatcgagctatctccttagactactaccggacattgtaaataaataattttattgatactaaagttttatttctgaaaagaggtaacaaaactatttgattaaactccttatgtttattacattttattacatgaaacactgtatttgacctttgtatgggagacaatttttctgtacttacaataatttaggtttcttatatatattatacttatgtaatgcatagatacatttacacacatagttaaattttctatgcacattgttaagtacagcatagttgtggaatttttatttattttttctttttaagtgaatgccctaatattttaagtagatgatatatggaatttgggtctaggtaaagctacttgaatcgtgctcataggactgtacaatatgaatcatccattaaggataaatgctttcattatatatcatgtttcttttagattaaattatgactaaaacacaaaacacattgtaataaataatcaatgaaagcattcttgcaactttgtatattaaccttccaaatgtacggcatgaacagaagtgaaacttttcttttttaattgttttgaagacagatatttctgctatgctattctggctgtgctggattttgctatgtagactcggccagacaagtaggcacagcgctcacatacattttgtggctatattccttagggtctcagatgctgggaatcaatgtagagaagccttgatcatgaaaaagcgctcagactcctgtatacagaggagaattcaaacaaaatgagtgccaggcgaaatctgcaattggaaaggtgactgctctccattctcaaggctgatgttcatcaaaagaaacttactctctgtcctatgctatacccactcttacttagccttgagtaaaagagaacagaaaagcaataaacaaaaacaaacaaaacaagcaaacacaaccccccaaatctattattatgtattttctactcttagagttgcatacaccaactctacgaaaggagagacctaagaaaataggaactgacttttcaaaatttctttctgttctaccattttgcccatcttcataaccaaacaagggtaagcactttgtacctttcttccttgtcaattattaatattctctgtactcagccttttgagctcttgttaaggaggccaaagaacatgggtaaattggtctaataaacagtgagtgagctcacctagcagagttggccataaagatgcacctacagtgagggccatggtggattgtgtccctgggcatttgaattggcatttttatattgttatcaagaacacttgagagcttataataaaatctatttccagggacaaaagacatgtgttggtttgtcttgatttcactgaaagagcgtagtggttacaaaatttcagatagcaaaacctatatttattttaaatagcaatattctgataatattctgtaatctgcaccctttatcttagcaacaaaagcagggcctaagcagaatgataatataatataatataatataatattataatataatataatataacataatatacatttaatcagaataagatggaagcaatgagacagtggtcataatttgtttttgttctaaatgtatagtaaaaaaacaaattaattacagtatcagaattttaattctaaattctttaaaaaacagttttctaagaataaaatataatgtttataataattttttaagttagagttttcagaaggaacaaatacacatggatctcatttaattgccccttaactaaccatggggccactgtaaagaccactccaacatgttttgagttatagcaaaaggatcatcagaaattatctcagtggttttcatagctagagccaattatatgcgttaaagttatgggaataaaaactagagatttgagatctctaaaacaatcagaagcataacagcaccactgtctcatgtatgctgacatttattcattagtatttgtgaaagctctattctccaaggcacaacttccacacaactcaatgttaaccccctctttctctgtgtttgaccttctcagtgctaccttgccatctaacagtgactttgttaacctgtaaaatgacacttatgacagagtcacactaagcattgttatgtagggcttcataatgtaatacgagcacgtatgtagtatatatgtgatagaaaatcatctgttacttttcattcttggggttttcgttttctcttaggcgatctctgctttcacaaactggtttctgagtaccattttcttggttttgtttttcaaagcgtgcatttagtttactcattttgagtaaagaagccacaataatggcacttattttagttttatatacattctcttgtttaatttcactgttctgtattcttgacacagaaacattcaaaaagcatcagggaaataggtcgtcattggaaatgccactgctttgggagtgggaatctctgaccttataaaaaggttttttgttttttttttttttttttttttcatgcctttaaactcagcagctgggaaacagaggcaagtggatctctgtgaggtgaaggtcagcctagtctaaaaacaagctgtttcaggctagccaagaaggcataatcagctcctgccctttacaaaaaagaggaagaaagagagagagagagagagagagagagagagagagagcgcttacaaaggaagaaaggaagaaagaaaagaaaaagaagaaaagaaagaaaaagagtatttcatacagtatctagctccaactctattcattgggggaccttctggaaatcaggactgtgagcaggtgaaaggtggagagacatggtgagttataaaggcggtataaaaaccttgtttgtctttgcatgagtaaacattcaagtgtaagagcggatttgcagaatttaaagtgtcccatgaaataagttaaacagaactatagttaaacagaactagttaaacagaactagtagtcatgaacttaaccagagaaacctcatgttctccccattctctctcatacaaattgcaccagggaagacaggtgggttttcagagacaagacacttgtcttcttgctaaggaaggctgaaccacaagttttagttatcccatgacactgggactccggggtgagaaaggaagtgctaggaatggaaaaagtttctagtagaaaagaaaaaagaaaagcatctttgtggcgttcttctctttcccgcacatggagctctgggtcctggtgatcagtatatagaccgctgaagcaatcttcagcagtctggattaggaatactgtacagagaggcctaaatttttgtctgtaccttctttagagcttcaagaggaactggctttgtgttatgtatggagatagagagagagagagagagagagagagagagagagagagagagagagagagagagagagagagattgagagagggagagagagagagggagagagggagggagaaagagagagagagggagagannnnnnnnnnnnnnnnnnnnagagggagagagagagagggagagagagagaggagagagagattttgaatcagtcagcttagggaagagtttgagtcagaacagctgagttgaatcagccagccagagatcagaagaaatagtcagcttattcagcagcaagtctcagaagctaaaaatattctaggcctagataagattgtactgagactagaagtttccaaaacgagactaggttagtaaacggaggcataagcctcagagactacaataaatcagaagaataaaagatatatattttgttgttgttgtgatggggaaaatgttctttataccttagagatgcccaaaccagtcttcctttagaggggagcattcacattttcaattaattattgaactaatgagattgctttcaattagacaccaaaggccaagtcaataacttaataatgaatgggatggtctcaattttgaaattatattaataacacaacagtgactctgtggggcatgtgagttgatagcaggaataagtctcttatttgtatttcctgtagtcatggaccatggcgaataattattttatggtatttctgtcccactttggtacattccattttgaaacccagctgccaatctgtgagatgtgcaaactgtcagaatattcagatgtagcacaaagaaggcacagtcatgaaaagattgggattcatcccatctgccaacaaggtggcaaagccacctcaaacacttctgtcctgtcaaattgatatagtctgccgtgtaatcaaatgaaccttacagctgaaactggtcacgcagtagaaccacaaggaacaaccagttgttcttttaagtaactgtttcgggtggcttgttgcatgcattgcttactaacacacagctgtacgagatcattcaattcccgtgtctaccacatgggaacaatgctctgcgagtcctgtcctcattatcataggatagctatctggagctctgtattagctactctgtatcttaagtcattatgttgaacagattattcttttgtctcctaaaacccaaattacttcctgcggaacaggcttgcctgcatgataattgaagatttaacttgtttttcaaaagatgatttctaggactcaatttcctctcagaaacaagctaaatcggtgatcagattcacctcttatctctgcttaaacccattacgtgtatattaatgaccctccatgaaaacctcacttaaaagtaaagcctaaattctgctttttagtccttttctgattttggagggcctcaagttttcttgtagcctctcatctggcatggtttggtagcaaattattctcttttgtgagtttgcaaggttttccacttctggttccgttaatatggaagcaaccatgaatgcttcaaaagccaagtggcaactggtcctggtctcagaacgtttattattctctggttgcagcaagcataacacaagtctccttgtaagcacttgaagagattttcagtgtctgacacagaaggagatccttaaaacgaggttattaaagatagtgggagagttccaaagccttcctgaactctcaagcttccaattgctctgctactctgtggtcaatgttgaaatatcttccccgagctatgctatcatcgttctgttctaagagagtggtgcccctcagaatttctatatcatacatagaaattgtccacacactcctaatgaggacccaactccttgacagctcaagtaacatttctaccaatgcagtttctctggcacagttactgaagcagtgctgacttcctcctcaccctgcttctcctttgaatccaaaaatacctataggtctgagtcatatcgcttccacctgttaaaaacgtcccttcttgcatagctgccacgaagcttttatagttatgcaccttcttccttatgacttacaggactgtcaaatctcaaggaagccatcctgaagaaagactttaatccgcaagttcagggggcagatgacaagtcggagaaactcacactgcacaactcacaattggcagtcactgaactcaggagggatgatttaagcttgttaaatacatattaagctgtagtctcttttctttgcaaccatgggggaaactagacagttttacttccatcttcaggaaacctactaatatgtagttctgtttatctttcatcgtggtgctaaagtatgggcaaaaggggacatactcctacatatttgtttaaagcatcactagttctagtctacagttatgttttcagtgctgactgttgggcactaggcaaccactctacagtagatgcatcttttccattcccagatttcctcagttgcttatagttctttgtgtaaggttgaagccttgtggacgtttcgccatccagtttggcatggttggtggtgtcacccttgttcagctcatgcttaggcagtcacgttagtgagactttatgagtgtggcttctgaggttatggggaaatggaacctcacagcaaactgctgaatcctctggcttgcacattgtttagaccctctcttctgcaatattcccttggccttaagtgcaggagtgttttacagatgtgtccacttgaactagactctacaactcttcattttgacttgtagtttacctctgacagcatctgtctgttacaaagatatgtttccaggagagaggtgaagacttcagttatccatggttatgaggacaaatgtttatagacgattgctgggatgatgctggtttggtaaattatcggtatatatttgtatccaataaacatgactttagcagcactaagtagctatgtgtttcaaataccaggcacattattacattatttctccaattgagcaggtcttaaagccaactagaaagctgttggttactgccaaggtgtttgtgtcattattgcagccttagggttattgtgtcgtgctggttatcaatgtagtttatccatgtcatagggggtagggttattgattgcattcatcatctcacatggaaccttttgatatgatgaaagctagttctaaatgaggggcattcagtttggtcttttgccctgcttttcagatgtatagtgccctctgctataaggactcccttttcacaattggggtggtaacccagatacaattgtcggatgtatgttttaggagtctcttgaatagtgctaaccaacaactcaaaggaggccttcataaatttgtatacatatttaatagtttattcaggtaatatactattcctagtgcctaaagaacattatgtaaatgctagtgaaataagtgcattgcattggaattaaagaggaaggcagagaaatgtcagaccaaagcatttgtgttcaaattcagaccctacaagttgacccatttcccatgatgagaaaacgcttttaatttttgaaattataatttaatctcaacattgatttccttcccctacctctccaaaactcttccatatacctgttcccaatctcttccaattccatggcctcttttacacagattattattgcatgcatatgtatgtatatatatatacatatgtatatgtatatatgtacatatatacacatatatatacatatatatacatatgtatatatgtatatatatacacacacatacatacgtatatattcctaaacataatctgttgaggctttataatgtcaaccatacatatgttctcaggattgacagttttcctgatggtagtttctataggcaacactactttagaaacaacactgttcaccaaaagttctgattcatccatcaacttctaggtactttaaagtagaaagctctactcaatagctacacacaaaagggataccatgttttatattcccatcaatcccaaggtcagtcatgcattacttccaagtatcaaacttccataggtcatctctacttcatcatcttcttcatcccaagcccctgtgtgtgtcaggtctgtatgtctgtcaacagcagcttatgggagcttgtgatcagtttgctgtcacaggtcttgctttcattctatttgtacatcactgacatgggccttgttattattatgatcttcccagacatgaatgtgtctatcagataaacttgattcttgaggttttagatcacttgctatctgtccccacaataaaccagaggccatgctctgggatccttctcagaaaactattaaaatctgttctttttctgttatatcaaaagcaaaccttaatagtaaggagaagctttcagctactctttctttccccccaagtgtttacagcctgaacaaagagtggggtatttggacataaactgaggttaggaaacaaaagaatgcagagataaatacctcagctaacattacctaattttatgcgaaactatgttacaaaagaaaacaaataaactacagtgaaaacagtcataaaggtatcagaaaaaatatattattagtcaaagcttttatatatcaactgtgcataacagctataagaattcagaatctgcttcagggttaaggaaagttatgaaggaattgttatttttatgtatgttatgaacgatgaataagagacacatgtaaatggaggacttctgtgagtaaaagatgttttgtgatgtatttcctatgttgcagtaggagaaacataaatgaaacttgagctatttcaaattagttttaacaaaataacaaaagtttcctaaagttgaaaatatataaaggaaagccaaagcaagacacaatggtcattggtagttctcaaccttccaaatgttgtgaccctttcatacagttcctcatgctgtggcaatgcccagtcataaaattatttttattactatttatattgctatatcataactgatattttgctattatgaataataatgtaaatatctatcattgcagatttttgtagaggatccttgtgaaaggctctttcagcacccgagggtttacaacccacagttgagaacctctgacctagtaggacatggactagataatgagattgggggaaagaaatgcccagttgcctagttagataagacagttgtggttgagttctattttgttttatatgcatgtgtgatgaggtgttagattaaaggcatgttgtctgatgttgatttgttgtaactataaagcacattgaattagttcatatgttgtcaattttataaacatgctgtttgaaactgattcctcagttatttcataggcactggctcttgagactgcttgctttggaattagtcataaatatagcaaatgctctatagtatttactggacgaacaaatacatcaaagttaaacactctacatacacatgaattgttgtttgctgaccactgcccatccatcctgcatttgtctttcctaagaggtctctgatgttgatcatatgtctatccttttcttaatacttccaggtatcttgggaaatgctgagccttaagaaatgtcagaagtgggtcaagattaatctgagagtattagaaatcctataatcttgtcagtggatactttcatagagattctgtaaatcaatcctggccaatgagacttgaagaaagaatttgatgtgagccttcagaaagtgcttctctgctctggagatggacaatagaaatccacttcagtttgctcactttcccaatggactgtgttctagttacttgccagtagcctataattcgtgaccatgaagaaagtcagatttagacttggttttgaatgatacaatcctaaattctatatctcaaatgctgaaatattcaaagatgcatatacacaaagattgaaattcccaaaatataactttggaggagaatttaaaattactgaaaaaatcatttacataccaagagggatttatttctcaaaattctaagagcaaaacagcacaatttcaattttaaacaagtaactgtaaataagaatcctagtttctaaaacttaactctcaggtataataatacaactaaaccagctatgaacagacacaccatatgcataagaagtcggctgtgaagtaatacagttcataggactatagctggtaatagtgtgtgtccagatttacatctgtagatcattagtcattcaagatggtttattgtcagcttatcaggaattaaaatcattgttgtgacaacagtcttggaatatcagtgacagagtttctagattaggtcaaatcaaggaggtaaaatccaccatagctgtggggaatacccttctgtgacctgaggtcctcaacagacatagagcaaagcaaactgagtaccagcctttgtttaattatgcctcctaagtagagatgcattgtgactagctacctcatgttccttgacaccatgcctccccactcaccaaattgtaacaaaagctaaccccatttaaaatggttactgaaaggtatttaataaaaatttagaaaaataattaatacagagaccatccaattctttcgacaaaataaaaccaaatcagtatctggtctctactggtctaagtcctggtgtttgatgctactgattcagacattctgatcttcaaggagccagacttctgagagagaacagttcatcttaagcattacctccaatatcctggtggattttaaggtatccactcacacctagggcacatcttctacagttcattcatgtgtatgatatgctattgtctggacacaaccccagagcaataagaaaacaatgctctgcaggctaacagatattggttccctaagcatgatgcaactatcatgcagtcactaaaacatatctatccctcctctccccagaactttcctgctgtaaataaaaagagaaggagctattaagacatgttctggctgggtgtgggggaaaggggtgcctcagcaggcccatgcctaggcatcccatccccctgagagaccagccacacaatggtgtagtatagaatagagtttattcagggcatggggtgggagttaagagagtagtagaggaagagaaaggcagagagaaggagagagtagaagtagatgctggacatgaccacattggggcgggggcaagagagggagcaagggagagtgaagagaggcaagaggctaggagaagcaagagaatggaggggccaagcagccccttttatagttggccaggtctacctggctgttgccaggtaactgtaggggtggagtccagacagagtacaaatatttccactctttcaaagtttttgtttttctaataatgataattatggtttgtgtagttttaaatttcacaccttcaatatttgagaatttaattctagggcattgagatactcagggttttagtttctaggctttttgatttggaggaatttcaacgtctgagattatggtctcaggcattgtacctttggagattttgattggcactgaaaggaccaagtctttccatgaagaagagccaaatctgaaaataggcaagaaagaaagtaaaagcgatagtcctggcacacatgaagccttccaagtttgtgagcttcttgaactcataactatgttttacagattaggtttgctgaaacttaataaaaaaaaatcaccattctgattaaacaacacctgctcagtttgaaaagctatatgtgtaatttacttaattacttacatatttatcccatcatgtatgcatttaggcatttatttggttgttttcatacaggttctcctgtatgaataacgaaaagaattcactgcttgctgcattgaaactttgtagctgtggctgatctcaatgtccagggcctcctgcctccacctctcgtttgaatttctccacacctaattgttttgtgcagaatgcaaaagacaaaagaacatcgtttgttctctctttaccaaaaaaaagaaaagataatattattttatctctttgttagtttatttatatataggcacaaaaggcatacatttaaataataccataaaatcggcaagtatgtattttaggggaaagacatggggagatgatctcattttattttagttattcttttttccccctaaattatccaacttttttcatgtttatgctaaagtgggttgcttctgtttgccattttcaggaatttgtattcagtttccttgataattttggccttgaagtctcactggattcttggactccgcttgctttaggacaactagatcatgccacatgtctgcataagttgtggactcccacagttttccatatgatttaagaatgtacacagtttgcaaagacaacctattctattttctaatctactgtatggcttactgagatcatatagtttctcttacttgaatgattctaatgcatctaatagtgagatattagcaatgagaaattgttgtatctccatgcaacctaaatgcggtaatgggttgacatgtcccaaaagccatgtagatggacagcttcacaagttattgtttattaacattttgatcatcatataaaaacttactactattgtggatattcatgtgtgcaccatacacacacaaatgtaatgtggtgctcttgtagaagtctaggacaactttaggaagttggtgctgtcccctccttctgagccaggatacttcctgttgtttctacagtgctttgttgtctagccttgttgctccagtcttcttttcaagccagttcctaccaaccaacttctcaaaggtgtgctgatattaaagatgcatggatgcagcattccaaagtcacaacctacatctgattggaatatttgtgatctgatttttgaaataaatgtggattaagacctacatggacatgacagagagggatacaaaaatatcattgtcctagaaatatggactataaataattttgtacaaattacataatttcagaatagtgaattatccgattttattaaatatttaataatagaatgtgtgacatatttggttttccttaatagcctattcagcacaagtttatttcatggatatattgcttctgggcatattttagctgacacacagcttgtctgtatagtcagtatttatatcacaattcaataaaagttaaaagcattgtgattagtagtgaatctctaaagacatgaagagtatgctaaagtaatgctccctaggtgagttgatcttttatcagattttttttataagcactaagccaaattagatttttaaaatagattctcttcccaaattttaattagatttttaatagaagtggcaggaaaaaaaaatctatcgacagaatttggaaataacgcctttctcaaagagctgaaattcagacattcaatggtgttaaaagccattagaatttcttaaaaattacatatttaataggttccctccttccaagaaaattatttcattcatgaaaattaagtagagttgaatttccatttcaggaagtagatttgatacattggtaattaggttaagtgacctctattattatttgggtgtctttcattgtgatcattcctgttaattatcagctagacagaatcaagactcatcttggcatgctttgcaggattatttttatatcattgatagaggttggggatacctgcccactgagggcagtaccatcccctggctttctccctgagtgtgtagatgataatgtagccgcatgctttcatcattctctaattgtgtacacacgaatacctgctgcaagtttctgctgccttgactccctagcaagaacaaactctatccttaaactgagaaccacataaaatctgtctactttatttagctctgtcacagtactttataacaacaacagaaatagtaactaagacaaatcattatctgtgggccatattcaagagcatggactactcccctaatgcctaactcccttaaataaatgggttaatattttaaaatacacgttaagccatgttcagatgacttgtaatcctgaagacaaatgtcttaggtaaatggatgagaaagtctatacgtttaacacagacttattttggaataacattgatttgaatttgattggttctacagatgttaaatacacagagaggaggccaagagaaattatttaatatttaaagacagaccagatataatatttaaatatttaatttcacaatgagaagcattaagatgctttataactattacatttggtttataaaaaataaattaaaatagaaaaactaaaagtgaagagagctgggaaacaagtggccatatcctgaagtgtccatggttgatgttttagctgcactatggttattcctggggagagagaattaccagtcagtgatgtgcaaatgattctactcacctcacaagattttagagccctctgcattactctcctgacctgaactcctcccagttcagggatctgaatgtgaagcagtacgcaacatccttttcttcttcaagctctgaatgatacacttttctgtcatcatcacttcctgatttcttcggatctgagtctaattgtcccttccctctcacattttcatcactcctagctagctactggacccgcactaacatataccaaattagcggacatctgccatagaccttgctcaatgtcgtttctttgcaatactgtacttttggatctcacacacaggccttacgtctattgcctgctctgacctgtagaattgtaataactaaataaatcatggtggtgggtcacactattgcccctgtgttctggattttcgaatgaaagacatgcagacacagactttttattttaatatgccttattcagctcaatggatgggctacttgttaacatccatccggttaatctacctcctgccaataatcccgagttattgcttactaaatcctatattttatcttggctgccctggacccagccaggcaagtctcttggctgttctccttcccatgcccccgctccccctccctccccactccttcacatgcctctttgtcctgccctcttctcaggcatggtgggtctcttcctcctcctccttcttcctctctgtcccagccccagaatcctaaaagtcccacctttgtctgtactaccctgtcaatggctgccagcatctttatttaccagttagaaccaactagggccagaagctacaagaatgcattctcattcaaatagtttttcgggatttaattagcattcctaatgtgcgcagttacactgactgtactggctggttttgtgtcaacttgacacaagcgggagttatcacatagaaaggagcctcacttgaggaaatgcctccatgagatccagctgtaagacattttctctcaattagagatcaagggtgtgaggacccattgtgggtggtgtcatccctgggctggtgggcctgggttctataagaaagcaagctgagcaagccaggggaagcaagtcagtaagcagcaccccccccccccaaggcctctgcattagctcctgcctccaagttcctgccctgtgtgagttcctgtcctgacttctttggtgatgaacagcaatgtggaagtgtaagctaaataaattctctcctccccaacttgctgcttggttgtgatgttttgtgcaggagtagaaaccctgactgagacattgacccttcaatttttataagctaactctttactaccagttttctcattttacctcatggtcatatatgacttccctgttcttttttaacaactggtccatctgtcagtcctctggcatctctccactggctttctttcctcttatctctttcttaaatgaaggtttcttgaatgcttatggatattctccagtcccagtccctaagccttcagtaagaatctacccctgtccctggacacacacatacttctgctttcattctgttgtagcaaaagcacttcaataattgtatggctttcctccttagggttctctatggcctagggattgatctcacacttgcacagtaaggcttgccataattgtcttttatccccttttgtgcagatctgtctttactccatagcccttcctttcaattttgtgttgttattctctcagatattttttcttcctgaaaagaattatttcattcaaatagttctttttcatccaaatcgattcagcattgtggtagtcctatgaatattacaaacactaatgtaattatttcgtcctacatttgtgtaagttgagtaactaggatattgttttaatcattcctataacccaagtctgagttcctgtaaaattgtattgcattctatgcaattctaatgttctcatctttaaaaaaaaatctggacaaccaataaaagcattttatcttttgattttgagaagattatgtacaatgctgccaacctttgtacaagtaagcaaacacattgccaaatatgtgtgtatgacagcaaaaaaaaataaaggaacaaaaggaactgtagaaaggtacttgtcattagggtcatgggttaactgaaaccctacaccctctgatcctttaggaagtgaaaatacgttctataaaagtcagtggataacttaatcttctactgttatttaacgtcctttctctacccatacataattcaaaatgctgtagccttgaatgtcccaccatgataagcatatgtccccttaggctctggtataatagctaagccagttctagaaatatagagtcacatctcgggataatctacatacttcataatatgtacatatgaatttaaacatataaatattaaaaatagtatcaaaggaaaccttatcagttttattgtgaattattgtatttgattttaaaagaaaatacactattttttgttttccaagaaaaccctacaaatactaagtggtcttgtggattgcttgcctatatacatttccatgcctcataagtatatgagttgggtttttatatattatacaatgaatataaaatataaaatagaagtaacatattataatatgacagatgtttagagaaagcaaaggtatcatgaaaagacaagacctttgatacaggatttaggtggttggtgtgagcagtattttttgaatatgaattgttcaccacaggttactgtgttgaaggagttctgcttgtgttttcactgaaagttgatccagttatgaaagtgccaactcatcaatgggatcatgcactggtacacttttaatgtgtagactattagagaatagagcctgaacatagaaagtaggtcaccgagggcatgattttcaagggtgtaccttctctgtggatccttctactatcttttttttttctgcttcttgaccacccttagatgagcagctttctgccactaagtattccaaccacagtgctatggccttggcacagctcagctgtctgagggctagagtacatatacccgaggctttgcactcaaaacagtcagtcttcactccagttatttatgtcaggaatttgtcacatcaatataaaaataacagtggtatgtaatcgtgtgttcagaaaataattttaaagttgtgattcatatatatatatatatatatatatatatatatatatatatatatatatatatatataattgagcagtatattgccatacaccaaattgtgtgatttaatggcctctgggtcaaaacttcactatattcttaaatgtttaaagattctttgcaaataaatgagattttgtacagctcatgagagagataataaagacgtatggtgcatcaccatccttctggatttcaaagcctgcgtaaagtcagaggaaaattgtggcctttttgttgaacacttgacttagcttttcattcagaagtagaagtatgtagaaaacctaggcattatgacagaacagactcatacctctattcgaattaaataagtagtttgctctctctctctctctctctctctctctctctctctctctctctctctctgattcatggtcagttcttctttaaatatatgtatatgtgtatacatcatataggaatgtggtgtgtgtgtgtgtgtgtgtgtgtgtgtgtgtgtgtgtagtacctactgagtccagcaagtgctgattgtatgtatctgtgctctggacctactctttctaactaggaagggatggggagtttctctaagccagttcagaagagctttcataagatcaggtttctgtggccaagacacttcttaggccaacttcagcagctaaattgaagctaataatgaatccatgatcttttgttttaaatttactccagtctaaaggatgttcctctttcccaacttcatccatccatgctctcctggataatacagattaccttgaggacctatgattctccttagcaaaagggatgaaagatatggatgaatttgtgtttgatggcaatgtttaaacaaggcttgataagatgtaatatgtttctcctcaagcattttagcaaaaatcaaccagaacttcagaagacaaacgtacttgaaaagttagtagttcatgagtgaaggtatttttataaggttctttcttgtaagaaatgagtgattacttatctggtggttggcactggcatcatgcaacatcattacccgtcttgtaaaaataacacttaaagccgggtgtggtggcgcacgcctttaatcccagcactcgggaggcagaggcaggtgggtttctgagtctacaaagtgagttccaggacagccagggctatacagagaaaccctgtctcaaaaaacaaacaaacaaaaaacaaaaacaaacaaacaaaaaacccaacacttaaacaatataggtaacaagagcttccttgactttttggtcaggaataatgatataatccacaagagagagaactcacttgacaatatcagagtctgtgataattttaaaacattttaactgacattaaaacataaaaatgtacatagacatgtatattttgcatactgctaagtttatgttaaatcatatatcttttctgacatcatttctctgtgataaacactttcaagataattttaactttttgaggtagcttcctttgtagtctatagtcatctgaacgtgcagtaacatccaccttattgattctagttaacttgcaatgtattggtctagcctccattcctctccttctactgcctccacgctcagggaaccagaattataccctcagcttctataaggctaacttttagcttccttagatcaagatatgtgatgttttgttttgggagagttccttaatttccttccctcatccgtgttatttcatgtgaaaaggattaattcttgtaattgaataatattttataaatatatggatgtgtgtgtttctttccattcaattaatcagtacttggattgtttttctcgggttgttactcttccttgtctgtataaataatgcctcaataaacaagggaattgaggtgtatgcctggcatactaactttatttcttttgcgtatataaatagtagtaaaaattttggatcaaataacacttttttagattcacctgttattatattgggtaaaagttgcttcataatgccaatgaactcaatttgtagtgaacttcctcaattagtctccctcacaaagcatattcaataactatcagcatatggcttaccattatggcaaaagttaaattcctaagtccaatctacttgaaagacagagtttatattccttgtgactcatgtgcttcctcctttggatcttaaaatagtgtttaattttctataaatctatatatgaacatactaccataccacttttatttaaataaagagatctgtaaaatatgcatggaacaacaactttttgaggctatgattttgaaagagaacaaggaggtatatataggaggacttggaaggaggaaaggagacatagaaattgtgtaattatattttaatctccaaaagagaggaaaaatttatataaataattctggcgattactttatacattataaataagatcaataattatatattacaaatattttataagatgcatacatacttataaaaatgtaaaatgccttatatatgattaaaaacaccttcataacattctatattagtacttctattctaatcctacttctaatcaagagctgacttggatagagtcccatcccagcgtaacctcaccttagttcatggtgttatgatccatgcatctttttcaaataatgcacaatcagatatcagatccaacagcactgtgtctgaaagtgtttctcagttgataaccaagacattcacagctatgtgttgtgaagcagtcacagacaacctcttgagtatcacccaacctttctgtccatatcaagaccaggtttgccctatacgtgagggctttgtgttactgggtcccgtatttgtacaaacaggaacatgaaatacgaatgactctgactttaaagatataaggaagtagattctttaggaaatgaataaagacctgagtgaatgtgcactgattgccatgggcttaagtaccacaaagacaataatgcttttgacccattgaaaactgctccggtatgtggcacatacccccattgtctgtgtgatgctgaaaatgtatgctgcagcgttctccttccagatgtatatgacctgaggattgttccagagacagacatactgaattagttagacctgcctccttaattcagctggacactataagccctacctccttttctcagtattatacaatattcctacatgtgtgttcaattctatataataaacctgagcttccaaatttccatggcttcaccatccatgagtcaataccaagcccagatctcctctttgtgtctgtgtgtttgtcctttcttcattccttctccacccctgtgagtttcattcttgcacttttgcaaggatatggggaattatatttctctccttcccatttctgtgtcatgtgggtaaaccttgagattacaggcttattgtctctcatctactactttgagactacagatctataagattacaaccttcagtgtgaatatcatggctgcacgtgtttatccattggttccatatttgcagactcaagaaagcgtgtgaaatattagtctttactgaacttgtacagatatttctttatcacaaactcctaaaaggtaaaatatagcaagtaattacctagcatgccgctgtagtattcattaaatttactcaggaaatgatctaaagaatataggcatctgcctgtagattacatacaaatgctatacaaacaagtcagtaagtgtgggatttaggttaaaccagtatcattgaaccaactctctgtgcctctgacagggaattccatacccattgcttccctgttttctcccctgaggaccttaagtgaaatcaaacaatgtatttgcaggaaaacaaccaaactctgttttgttaaattcttatatttgagtcccttccataataaaaagactggtgacatcctcacataattttatggggttttcttttcttttcctttttgtttctatattggatattttctttatttactttcaaatgttatcccctttcccggtcctgccccccccccgaaactcgttgtttcattccccttccctatgcttctatgagggtgttcctgcacccacccacccactcctgtctcccttccctggctttctcctcaagggggcatggagccttcacaggaccaagggcctctcctcccattgatgcctgacaaggccatcttctgctacatatgtggccggagccatgggtccctccatgtgtactctttggttggtgctttagtccctgagagctctggggggtctggctggttgatattgttttgttgtttgaagtttacaccttgatatattgatatatatataatgcagacaatgcatcttgttcataatgtccacaaatcccctgggtccacctcagcccctaacatgtctccttcttacttccgtgtctagggaaaatgactgccagtagggtgcctcaaaactctgtgcttctggacaacaccattcagactcagtggcttattaaaaagggagaggggcataacctttatctctcatcacatttgtagataatgtaattttcatactgtgttttgttccttgaattactggccagacactaaaaccttaaatcttatctgagtctacagaccttgttatactttcataacacataatgtttgctaagtttttactcacatatttaaacttgtaccgagcatggatccccagagagatgacacaagtcaaggggatagataattcagtaagtattctactttatctagtggaacatactgataaattctgaacgatatacaagaatactttgctgcatggctttctccattagtccctgatcagaggtctcctggttgtgctgcattctaaggaggttaaggaactgtaatggagagttgagagtggcaaatggtcacaagtatttttaagaggtcaataaattcattattctgccatccgataaaatattgaaatcaatttctgcctagaatgaatttcatgagatttccagaaaatgagtagccttgttcatttgcgacaaaagatgacaaatattagatgctgttgccatatctttttgaatacaaatatggctatctatggatttcttggctccctattgttgaacattcaggaatgaaaaattccactgagaattgtagagactcagaggaccagctatggctataatataaaaagcacatagcatgcatatatacctatgtacatatatatgtacaattaaaatatctgctctttgaagtgagttcaatattatttagactgaatgctttgaaaactgtatttttgagagagaatatgggaagtactgcatgaggggaaaatatggtcaaaatattataagaagacaatttaaattatacaggtaatcttggctgtgtatagcagtctacttgttacttagtccacttccttttgcagtactcaaagaaaaactattaatctgttataactacttttaaaaatttcaaaatttaagacacctttaaaaataacaacaaaaaaatctattatattgtctttgtgagcattaaaactattaggaagaaactgctcaggccttgtaggctctgtatttgtcacattggtctcctctgtgaactcctatgagtactacttagttgattctgtgggctatgttctcatgatgttctccttcccttggtctcctacaatctctctcttctgtgggtttcccctggctcatcttgtgtatagagctgcatctctgcatctgctcctatcagttgctttatgatgcctctgaagacaactgggttaggcaccaatatatcctgcagaaaatcattaggaatagttttattaactttttaatttttatttatatttgcaagtcatgcttgattttatgctgggtctcgaggctgtcctgtatgtgtttcctggccatctagaaaatagaaatagtcattaaaaatctcccaaacaccaccaccaccaccaccaccaccaacaacaacaacaacaacaacaacaaaaggacccgggacagatgggtttaagtcagaatcctaccagactttcaaagaaggccaaatgccattggtcctcaaatagtttcacaaaatagaaaagaaaaataaacattgttaaattcatttgaagaagctgcaatcatcctgatacccaaatcatacaaagtttcaacatagaaaattgcataccaacttccctcctggacatatatccaaatacactcaataaaatacttgtaaactgaatccaagaacctatcaagattgtcatcccctatgatcaaataggcttcattccagatatgcaggaatgtttcaacatatggcaatcagtgaaagtaatctaccatataaacaaattgaaagaaaaaaattacaaatgaccatctcattagatgttgaaaaagtctttgacaaatcccaacagtccttcattttgaaagttttgaagagaccagggatataaagatcacacctaacaataaaggcaatttacaggtagctaatagccaatattaaattaaatggaaagaaactcaaaatcattgaattaaagtcagatgtaatcctaataggtcttcctttacacgttaacttggttatttttccttttagcttctaatattctttttttcttctgtatatttagtgctttggttactatgtttagaggagaatttcttctctgagccggtatgtttggtattttataagcttcttgtaccttgaaattcatcttctttgtcaagctaggaaattttcctataattttgttgaaaatatattctgtgcctttgacctgggtttcttgtcctttctctattctttcatactgtctcctatttcctagatgttttgtgcaatatatatatatatatatatatatatatatatatatatatatttgtgcaatatatatatatatatatatatatatattgttcaacatacaaacatcagtcaaaataatctaccatataaaaaattgaaagcaaaaaattaactgctgaaaagcctttgacagaatccaacatcccttcatgatgaaatatttgaagagaccagggatataaggatcacacctaaccacaataaaggcaatgtaaataatctaaaatagatagataggttgatagatagatgatagatagatagatagatagatagatgatacttagatagatgatagatagatagatagatagatagatagatagatagatagatagatagatgatacttagatagatagatagatagatagatagatacatacatacatacatacatacatacatacatacatagacatagattagatttagcattttctttgacttagtattcatttatcctattgtgtcttcaatacctgaggattctgtttgatttttcatattctgctggtgaggcttgtctctgaggttcatgtttgagttcctgaattctcttttgcatatttccttttacttgcttttttaaaattctctctccaattttaagtctttagctgttttgttcatttcctcttagtgtttgcttttgtttccatggttttctttaagggagttatttatttttctttaagaacctctatactatttataaagcttgttttaaagactctgtgtgtgtgtgtgtgtgtgtgtgtgtgtgtgtgtgtgtgtgtgagctatgttgcaatactcagagactgctctagtgaggacgtactatcttggctctcattatttgtgtttctactctgacttctaggtatctctgtttggggtaattataattttaggtgctgactcctggtcttttctttgttcattaatttgttccttcatttttgttgtataaaattcttttttttttattttctagatgaggggataagatgaaagccttacccaagccatatggacacagcttggattgagcccatgacatttatgtctctgctgtagctatccctagatctaggtgtggtagcttctaacctctgtacctactaaactaggctggaatattttcagctctgagatttactgctcaataagttccactctattgaactttggctggctggttcaactcaccttttctggctcaaaatacctttccaagctgactgattcaaactgacttctctcagcttctcactgaattgctatgcttggaaaaactgcctcgatttctaggaactaaaccacactcactgaacagcccttcatcatgtctgttctcctgagagttggggcttaacccatctctgactcattctgtcaaatttttcactagtaactttgtctggccctcaattagacttcaatttcaaatatttctgcttccttctaaaaactaaattaacctacgttgtttgggattaaaggtgtttggcaggtctacattccagctggatcacacagacttagatctttggatatgatcctttgccagagtggatatattgctggattaaaatttctctacattgttgccctctcttgttctttttaagagactatggcagctgtgggttgtcttgtagaaaatgctttcaaggtgtgacaactagaaggttccaggtaagctatattagttcttaagaactgacacttagggatgctgatggacgggtagagtgctagatgaggtgctccacaggaagaagggaatcaaggtatttcatcaggatctgctaagtccactgaaaacatatcagagagtgaggagatgcttcagagctgtggatgagagtgggtaattcaatttggagtagaagaggaaagtgaaaatcagaagaatatgtctcagctttgctggcctacttgcttctctggctgtcctggaaggaggctttctagtgagagcctgctggagggctgagatgacagaatgagtatagggagatgtttgcaggagaagagctgtgtcatctagagaagatggggttagaaaggagagagtggggcttagcaggttctttactacaaagctggggatgagaccaaggaatctggtttggaagagagcagggagtgagctttagttaacctatctgcttccctggccatgtgtgttgcccctgaaattctttatgtctgactatagcagaggaaagtttctggagatttttgtctggcaatcaaattgctttgtggtgttctctcataagattattttatcagtgaagtcactttataagtgatattcaagatgagcgtgcatgtacatggccacccacaccaaagggcctcagcttgtagtgtagttgtgattaactgttgtatgtgattttctctttgatggagtcaacagcaccttctatatttttctgaatttgcaaaagctgctatgagactgtgagatcaggcagaagaccatctacctctcagcataacaaagcgggtatcagaggctattcttttaattccatggttttcttcacttctctttggatacaattataattttaaaacaacaacaacaaaaatcagcagagcagtatgttataaagtcagataacccaagaggaacatatttcatacgctggggaaagtgacagtgggtttccaagaatatcctcgagagctctcctgtaatatttattgcgagaagacaatcttattaataatttttatttgaaattgcctgtgtatgcactcagcaagtgctacttgggtgtgcattatttccttccatatcgcccgatatgtgttcagggatgatcagtgcaagccatcctgtagttctcccatttatgacattggttgttctaaataaagcatgcttcctgtcatgagggagtaggtgacttccaggatgcagtctatggaaaacagagtatttcttctcaaattctttttaatgagaacctatgtccttggcctcattagagctaagatttctgaatcacgagactaacaggaatgacagcctgtgagaaattcaaggggaaaggcgaaattccctatattgtaaataatgactgagatgaacttcagtggtacaagtgttcttcggattggatatcagcataagatactggaattgttgactcatgattatcaaatactgatgataggtaatgtttgatggaacagcttgttttctgctaaaaaaagatgatatgtggggaatctggaaaacactttactaggctcccatctctctccctctccctctttccccctccttctctgtgtatgtgtatgtacttgctcacacacgtgaacatacacatatgcatatgtgcatgtgttatgcatataagtgtaagtacgcattcgtctacttgagtgttgaggccatcggttgatgtaaaatatcttaaatttttacagtgtctctcactgacatgaagcttgctcagttttttaaaatgacagcccatcaagacccatgcatctttcttggtgctaggaggattccaagagccttttccagactctcattgtttactgcagatcaaacccaaggtcctcttgtttcatagctagagcttcagttactgagtcactccatagcccagcttacagttcttaccaactgaccacttcagttttcctgaatcttagcctattcaggtttaacacagtttattggtttccaattgttggcagagaataaaaacagccctcttgtgttgaatagttccagaataaacttcacacatacacacacacacactcacacacacacacacacacacacacacacacacacacacacacacactcctagctggatatacaccagcatttaaaccatgtattatctggattattgaagggcatgtaggacatgattgctatctcttcaaatagattcattaaagcacatcactgctactattctaaaaatccccaccccacccccccctttttttaatgctatcagcttttctaccagcttccctaggtgaacccactgaactctctggtacttcacattccagacttattgtcataatgtctcttctccttgttgagggttcctttctgcctgggacattgttcctacttcttcctgaagcccatatccctaaccaatgcaaggtcagattaagactctgttcaatacttttctctgcaatgctgccaagccattttgatccttaaccagctatgggtgagattccccaagccccctcattcttgtcaacttttgttagtgtgctctgtgtttaattatgtgtaattgttaaccctaatgtaaaatctatctcattttggttttgttttatatttcaccaatggctaatgctgctgccaggtttttcaaatgtttctctggagctagctttcatttttgtcctgatttgcttgggtgttaattttcctttgaatagtctgaagttgtatgcttccccaagtagtagtaggggaaatattccaaaatctgcccatctttggaagggctgggttactgctatacttcttaattttccaaacgcagagtttcctcaaacaagggctgtagactgggcaacaaggctgctggtttcctctatgtctttatcatttaaataaaacttgtcacattattctggactgtggttcttagaatcctgtttttcaaagtgtaagtttaatgttgctaatgaggagagcacaatgctctacattggggcctcatgtggatatgcacccataagaagcagagctccatagcactgcattcagtactattcaaatctggtatagtttggttacagcagaaatagattcttttctaacgcaggtataattattttgctgttataaagaaataagtacttcaaaaacactccaaggcttcccagtgcgtacaccttattgcaaaattattactttggagatagctgagttcttccattgtatctgtaatatttgatttccacttgaacactggtagcaaaaatgagtttgtacaatgtgtctgaggtacatttagtgaaaaataagattagcattaagtgttgtttgaggctctgtttcagactgaatccccccccccccttacgatagagaacttccttctgttcttgggaacatctcaggaaatgtgtcagcatctcaaattaacacaagtcttatttatagacacttaggtaaatagaacatgtaatgaatgtaccaagtctaaattaaactcaaatacatttgggaagcatgaaaaaaaacatttcttttcaatattaataaattttaatatcaagaattatcactgtttaggtacatttgataaagtgttagaaataattttgcttctttttaacccagcaaaatatgcaaccctaaatgtcttcttatgtattcagaaagttctccagaatgtgtgtaatcaggatttctcagccttcaattttctcatttggcttgccattctcattgtcccattttctcttctcttcgttatgtggccttagaaaatgacaagattcatatctctgtctgactgatgaactctcctaagtttaaaatggcagcgtttttataagcgaatcttggggctgtcacattgatttcgggaaaccttgcttctctctgtcttctttcagtgttaatgcctaccatgtgagctgggacacaaatgctctctctgttggctgaagggcagagggctggtatggccagagggcaggggctgccaggaatgaggagcaatgagaaccaagggtgaggaggttccaattgggacagagggcaattgctctttacagagtgcagtgggcaggtcgttcacactagacacatgtgactttagaggaaagaatactagccattggggacagataaaatggcatctcagagcaaattttactcaagtataatgttcacaaagtatctgttttcttattctctctctctctctctctctctctctctctctctctctctctctctctctctctctcgtgtgttgtttgtatatttgtgtatttttatgcataggcatatagattaatgtttagctttagcttctttggtaagattgataaaacacaactggactttcttacatacatgttacaaagtaataagttattattttaacagatatgtgattttagtttcctctatcacattttattaacacacatatataagttattcttcaatgttcaaaatcgataggtttcatggtgatattctgcagtcatcaacaatgttataattttcctcaaaaaacaagttctcttctataagtacaaatccattacactatttacccgggataactaggggaagggacagaatccttctgaaatcctctgagttgtaaagggcactctttctagcatgatgaagtttttaaaaaggtgctaattttactacatttctctttaccttttatttcctcagggaaggtgtcaaggatcagtagttttcccagatctaaaagatttctgcccataatttttttttgctcttgaatgtttttattagcgcattttagatggttgagagatgatttaaggatgaaagattgtatggtaaaggtttgccaacctgaaaaatgttgtaattctttgtctttttttacctaggatgggttaagcactattttttttaacaaaacctgggagaactatttcaaattaaaccataattacacgtgactagctatagggcctcagttctggaatttttgcagatcttgtcattgaaatggctgttttagaggcttatttaaagagatgcctgtcgatctgatctctggtgtttaaggatttagaggttaacctaaaacaattagaagacggattttttttttcaaatacctatttcttacagagtttacctttataacttgatgatgcagagaatataattaactccaaatatacagcacatagacacccgttatctgtttttaaagaatgctttgtgatctcaacctctacacatgtgaactgtatccaagttattcatggtgacatgttgctgaaggatcattcatattttcaaataactaaggaaaagatcttcaggattttatttccattataagcacatagcatttttacagtgcttcttatttacattaattatttagttctttggtacctcatgcaatacagacagtgtccaagcagctgcccaatccctcccttacaatcataatgttaaaaaaactacttcaaaaaagcagtggcttaaagtaacaaatgtatactgttttccagtctcagtgagtctgagaacttgggtggtttatctaggagctggcagctcagcctctcatgaggctgtcatcaagatatccattggagtcccagtcacagctgcaagcttgactagagtcaatgtgcatcatagctcagagttgattgttgacagcctccaagtaccgagaagcttgactactgccaccattttctcactacatggactgtacatggcacatcttgtaacatggtggatagcttccttcatagtaagacattacaactcaagacttaacagatcccttgcgaccaccagctttgctgcatttttttatattacaataaggtcagtagatcctgctcagacaagaccgaccacaaatattgattgtctgggctcgttatgcaccgtctttgaggctgccacctacatttctcctttgacagcctaagtgtgtatctttcgaggtagtaaagaatcattaagtctgttgtctctttgactgttttacagttaacagatgcccaacttatttctattcaaagcttcttttaggaacaggccatctgtgtacacgccattaacttcacaccaatttctcttgctttgctgtgtagtgataagatgttctaattacagtgtctgcttccaagtaaccagtccctccgttacaaggctaggagatagcattttctcagaatcaactcgttaacgcactcacattacacaagtggttaaattgggaaggcaatcggcaggacgttctgggtcctctgcagtgcatgcttgagtagttggggtcatcaggtgctgagatctttagctttagatcactagagttctgaggagaataagtctcctccatcttattacccacaccaccataagaaaatctacatttgcatagttaacagtgacatgtcaggaaacaatatactatatggacaactgcactgcggctctatgaagttgtatcacctacatcaggttgtgtaaataaactctatgacatatgcacacttatgaactcactttgcactcatattcctgtcatgaacaatcacgtgactaaatgagattgatacaacatttggttgcaggacagattatcttgagaaggaaggatttaaggaagcaggagaaatgaggaaaaatttggatgacatgcatgtgtcaatatgtcatgataaaaaatattaccttgcatgtgaacttaaaaattattaaatgaaataattttaaaatagggtagacagactatagggaaacactatcaagtttgcaaaaaatatcagattttttattgaaagatgtatgtgtcttttcttctaattattattataaaaataattttcatccataggatgacttagtaattgaccaattcatgtttatgcgtgattgaaaagctttttagttttaatataaattactttattctttgagttcaaacaaatttagttacttctgaatgttttattggaaaacaaacttcaaacaattatattttcctttgtttccaaaaagctgctcccacacacaaaacttgtgtgctattctcaaggaatgaatccttatatgaaaataaataaaagattcaactgaaacataaaaatataaattaactcagtcagaaaaaaacacaattattgattagatcgaaaccttgattatgagtcagtagcagatagtaaagcagggataatgacccattactaagtggaaattatttagcttgattattcctgcattttaaagagctccaagatcagccacatgcagacaaatgctgcatacttgtgaattaaatgcaccgatgttatgattatacttaagatctcacaatttcatttgctttcatggagcctaaagtacacggtcttatgaataataatcatcctatgattctatgttcatgaaatgaaattataaatgaatctcagatttcctttcagtctctctgtctctctgtctctgtctctctgtctctgtctctctgtctctgtctgtctctgtctctctgtctctgtctctgtctctctctctctatctctctctgtgtgtgtgtgtgtgtgtgtgcgtgtgtgtgtgtgtttgtatgtatgtgatgatgatgaatatttttaagcctaatagaacctgattggtaagatgaagaaagtatgagatagttggggtttgaggagataaaatgccattaaaatacttttcaaaagaaaaacatgatactgaatttgtaatccttgatcaagaaattgtttggcaccgagttcagccttaacattaaataatatatttctcggcattgcctgggagctgcgatcaagttttagatttacttatctttgcttgggtttttgcgtgattgaaaaccattgtttcctctctgtggctgttactttaattcctcaactcgatcatttttgtgaccttttaaaaacatcattccgttaagtatggaacctttcaagtcaatagtggttcactatacttgtatgagaaattatctgatttaattcataaatcacatgtgaccctgggattcagccagatgcccgcccctgcacttcacagatagagacacgtttctactcataatacagtgcaacagaacggaataagtagaaccccacacaagactggggaaaaaggtagttaattggtgcagaggaaggacatatcatcagccagcagcaagacatttaaacggattttttcttattaatattaaaaccaatattagcatggaaagctaggaaagacagagggaaggtgtgctatatttcttcaaagacactatcagatatttatttaactttaagtaaagcacagaatcatatgttcttgtttgtgggttgaaactcctttatatttcagtgaaggccttgtgtgccagggtgaatatcaactccactgatcatagcatgcaatatcaatcatgcagtatgttcagggcctaactgtgattgctcctacatcacagagcttgcctttgtcaagttataattctagctcttaatgtattgcttcatcatggtgttctattacaagtattattcttgcagatcatagagggtttggttactgtgtgatggcagcacatatcctacgagattggagcatagagattacaagggtcattgcactattctcctctcccttctttagcattctctgaacaggattgctgcaggattgcagcttttctaacacatacaatcttgaattaaaacctagccatgtatgtaattttagatgaaagtatgaactagtcaggatagtctttcaatgccaagagatctattataaatgagctatatgttaataggatgttagtcatacaaggtgtatgtaagcaattatggtggcactaagatctttgcctgtctttaaaacataagctcttgccaggtggtggtggcgcatgcctttaatcccagcacttgggaggcagaggcaggtggatttctgagtttgaggccagcatggtctacagagtgagttccaggacagccagggctacacagagaaaccctgtcttgcaaaaaaaacaaaaaaacaaaaaacacccaaacaaacaaacaaaaaagaaagaaacataagctcttgaatggtatagatgaatggatggataaatccttgggtcttagatctgatttgggtaatctctttcttcgtattttggccttttcaattttttttgctgaggaaactacaccttttctttgcattttgggcttcattttcttctctcattgctatatgcctcctgcatatatacacatacatgcatacttacatacatgcatccatacatatgtacattttgtatctgaaatgttcatgtatcattttcttgcactatctttctgtgtcctctgcatttgctgtcccttcatactagaacacctattctccgaaaaccttccatgattatatctcctccatcttttcctgtagtctcaagtagaataagcatgacttattaagaaatgttttaccgaacctccctaaagcaatgtttacttgtttagtaccccagactgaattcattcaatctatgtctaccctgctgctctggatttgacatagcttcttatgtcagtcatttttctatatctctgtacaaaaaaatataaagctcagtataaagaaactgcattggagcctttgtgttcctcatagaacataatttgattggctgaatgagtttatttgtacttacctccagaggcgaaacattttactacaagagtgttttctttatctggttgtaatcactgttcattgtttcataggaacaatgaaagggaagtgagttcttacttctaagtagggatggatctggggtataaaaagattaaggaagacattaaagaatatgtgacacttcaaggattctatggtaatgagggatagaaagtaactagaagaaggaaagctttccatgtataataaaggccacacatgtgtaacaaatatacaccatagacatttaagaggttctgtttcatggaataaaagatggacactggttttggtaaagtttcaaaagggcttagatgccagtgtcatttgattctgtgtttttgttatgggtgaagatgttcttggaagttgtgtaaatgactaaattggtaacatgtaacatttctttgacaatattcccaacacatgagaagaagtggctttccagttccattcagaatctagaggcctctgttttcattgactaactacataggtcctggttattcagtgtgagttctcagggtcagtcagtccaagtcaaaacctcactacaatcccatttggaagccaaccaccgattttcagtttccatctgaacctcccccaccaccccattgactcttgtgtcccacagagcctcagatcattatatctacactgtaaaatgcataggagaaaagttgttcctcaaagtttcaaatcgtgtccttttcctatatagtcaaannnnnnnnnnnnnnnnnnnnatatagtcacataccctaaaaacatgagttacaattgactcatataaaggtcagtagtatgtgaagcctccgttgctgctctgaatagtgaacaattcaccagagaaggttctgcattttgtgaaaatgtggttttagtagagagtccaactgtcttcctccaactgcagatgaaatttacatatttaaaacctattgttcggccttgtttagtaagctaccatcactatcagtcctgtgaagatcacatttacctttcaaagaagttaaggaaagttttccttttctctcagtgactgctattcccacattatactgacctgtgggaaagtcagcactctccatgtgtcacaaggctgaattctgctgtctggttgaacactccatatgaagagagttgcctttaattggtttttaagtggtcaacgttttattcaacattaatttactagcgtgctttactgaattgtttttcagtgtagcatgggaaatttggatcaaaaagctttttatcaaaagcttttggagtcaagtaataatcatatattatgaacattgttacaatatccaaggcaagactcacacacacataatagatagttctgagtagtgtttctgttttgtttaatgttgtgttggtttctacactctggtagatttgggttggctacagccctcttaataggtgttaacagaaggtcttctcttagagtatagatggccaaataatatggataattttaattaaaaataataacttttaaagaatcattttgagtcatgatagcttttctatccaaacattgtattaacaacacaaatgaagaaattataagtttatttttaaaaccaagtatcattttaatgaattagtaaaactagtttaaatgaatggatatgactttcataaataaaaataatatgtaaaatattttaactatttcaataattaataacaattcaaaagatgggagggatgatatttatttgtccattgatatagaaaatttatactaagagtacttatgtatttgtagttaaattataaactttgacattttcttctcatttccaaagaaatgacttacaaaactactgagcataaaatctacaatgaaacctgtaacttcactaaattggagatccttaatcaataaaaatcatcctataatattaaatgatctttacaacccctcttaaatattaaaattcctgtacatttatttttatttttaaatgatttcaacatcaggccatgtctttttaagtacaacaactgaattctacatcatccttcattgttcttattttgttttgaatgcagctgttatccaataatttggctgggtgtgttggtatatacctttaattacatacgtggcaggctgaaagagaatgctttctgtgagtctgagactagtacagattacatagtaagtttagagacaaattggtatacataactgagttcagaaagaaattgaaatatataaatgaaacttttctcaaaacaaaaaaaccacaaataaacaaacaaacaaaaaacaaaaacaacgcctagaaatgacagggaggcttcaaccatggtatttccaaaacctgactgccttaataaggacctgaacaagttcaatatcaattgacaagctaatgtaggaagggaaatctcatgggagccatacccagaggcatagacctacaggcagctgaggaatgctgagaaaaggagaaagttttccttagcgattagcccaattggttattcaatgccaagtagctagtcatgaaatcatatacatacaaataacactgaatggtcttaccaggttgggtttatagatgtgtgtgataacaagggaaaagaggccgtaactttgagaagattcagggaactcgagagagggaggaggcatggaagagactagaggaaatgatgtaatcatattttaattccaaaattgatcaaaataagacaagaataggacagaatattttggttccgaattgcctggagaggaagagcaaggttatgtgactctaaataccctcttgccttgtttgtctgctagttttaagatacacatagtgtcctatcactgcccagaattacaaggctgctggaaattgttgggaataactgaggactatgactaaagctgaaactttgcattcactttgttgatagaaagaaatgggtctaggatacacctaagaaaacaaaacaccaaggacctcagtgaatacagtgaaacctggaaggatagagtgtcacggttgatgatgattttgctagggcccagaaggcttaattatgggatttacatcattattgagaccagggacatatattcgctatacagacattgatgatacagctatagaaactgagtaaaactacatgcccagaaagggtatattaaaacttatgcctctttgatcagggctagaaacaaataggaattggaacttgtcagaataacgggatcaaaactggtttagaccctaggaacatggtatagaagttaagagcttttgttgctcttgcatagcacccacctgtgtttagagccagcactcacatatggtgactcacaacaatctcaaaactcaagtttcaaagattctgatgtcctcttttggcctctgtaggcactgcatgcacttggtatacagacagatataggcaaaacgcacacatgtgataggaaagcaaacgcttttatgaaatatatctctaacggaaaccataatcatttcaacacataaacagaaatgaaaacaattttctaaaatcaacactacacatgtgtatatttccacaaacaatatttgaggcatttcagtaactctgtaagcctgtaggtttttttcccattcaattaagtcatttgagacctacttgtctgccaaagttagaaaacaaaggtgaaaactgaatttgagaaaaggagatggttgagaatccaaacttactcagtctcctggggatttgggccatgtctctctgcatctgcagtacttaccgtgggatttgacaaagctgtatgtcctatttgaagtggcaatttggagccctggaaactctaaatgagtcatttcaccaggtagatttcactgtaaatgacaatccgagttgctgaaaaaacttattgtccagcataaatgtcagcagtgaacttcagccaggaatagaattgcaagcctgtttgccgctgggccggggcatacactgaggcgcctggttagtaaccttgctcatcaatctcagtggtccatttgctttgcctatggggtgaccatgttaacgattctggtcctcattatcctattcacttgccacatttgcttgggaatcgggagtacgacctgcacattcatctaccttgtcactttcactctgacttcaatgtgctgggagctgacttgacagcagatataattttgatgaaattagagaatctcatggaatgagtttgtctcattcaatttctgacagaggtgtgaaagaatcccttgccttccccatctctccttaccctcactgtcgtgagaaaaacaatggaacaggaggcaatccaagctccttttccagggaactctttcctctagccatagactattctcaagtgattccttaaccatttgcaggaataaacccccctacaggtagccccagattcacagagcctcattgcagagagttaagcgcaggtgtgcccttatctccatggccagcacaacttggcattatttgctgttctgctcatttgtacagccaccagctatgatgatagctcatgtgatattaatttttgcccccgaagtttccatttaaggttctagagggaaagacaatagtatgtgttaacaaactaaattattggctttactatgtttgatgtttttgtgacatattgtttttcttaataaacaacgttttttatataactgttatacattctttttatgtaattcagactggaatgggcatttttatgttaataacattaagaaacgagagcaaggaatgtgactatttcttttttatttagttatttttctatatttctcaagattttttttaatttctcaaattaggataagattaatccaaaatactccataaatgaaatagtctattccttctgtccttagttgcctctcagaggttgaaggagtgtcctataagaccccacacacttcagatcccccactatacagggtgggtcttatctaagagcttccttcctgtggtttagctatcagaatacagggaagtaccatataggcttccaatagaggaaagagcccagtgcacctctgaatcttatgaaccacaacaatgaatgggatagcaagataccattagtgatacaataatgccgctcagctctcactggtatccaacagctatctaagtaaacttaaggcctgctcaacaagggaagacatctagacacctagctacctaccctggactagtgaagtcacatatcttagaagagaacttaacaactatcactttattagacaagtgtaattcctaattgtactctaaaacctatctttatatccacagataagtatagctctcatccgcgactttaattctttttcattcacattcttgcccagcaagaaaaccttgtgttttcacagtgcaactgttatccttattggttaagtatgataacatactgtgtagttcattcattgaggaagcttgagataccatcccatggtaggttttgttgaatcagtagctacatcttacaaggaatcttggaatattgacattctgcaaattgataaaacactatgtgacaccatcgtgtatttataaacaatgttggaactttgatttcttaacaatgctttcatggccttccctggtttgcaagggtcactttataaggctgagatgaaaagcatcatttctccctgaaactctgaatttcaatttgtaaggtcagtttttctttgtaaattgaaattttctttgttaatttgctcaataacaataacaataatagaatcaaacaacattgtaactttatatgcatatcgattgatagtagtagcatagaaaacaagttgaattggatgaaagcattgtcttaaagacctggcaatgaattataatggttttaatctaataatgcttttaaactaaagttgtcttgtgttaacatctggctggatgattactatatcctctttggataatcgtgaataagcataacagagtggatacagaatccagctattcaagaagagaaagagagaggggggatgggatttgacacttagtacagaattaacttgttatgctcgtagaaggtttgttcattaaaaaccaaaaatggaactgtgaagtgtgatgtaccactagctgggggagaatgccgagcagttggagaacagttacttaactgacatgacaatggaagctgactaagccttgattgactacttactccccaggcttttcagaaatgctgctagggagaaggacatagttcacttgtgtaacacctactgcatgttgacattgataattgctgatttatataattcttacaagaaccctgtgattatttcattatttttatattattgtctgatgtgtgtccttcgtttgtttgttttgttttgttctgtttttcagttttggtttaagaattccttgttttgtttttcattcttagtttaaaagcaaggtgaatcagaatatagtaataaacgacataccttattttaattccaccattcaagagtaaaaccctggcctggttaacattgtaagacattgccttgtaagacaaggtcacaccaaacacaaaaccaaaacccaccaagacgaaaagtacccatgtttcttattagcaatcaagggagtccagtagatcatagatccactttcaaggacagcacagcttcagtagctcttttttttccccaaatgttcagtttcagattgtggtttccctcccctgtaaggtaggatagcatactttctcaagtcacatgaagtcacaaaggggttataaccagtactgaacaacctgctatggtatcaaactacaatatcagtatattagaaagattaaatccagtttggacataattatttttccttcttatggtgtttaaagttggaggctggactgtagcttgatctgttctcctctctcctacagttgcctagaccaattgtaggaccaatagttgcaattcattttctttcttagtctaaaatactttcctccaaaaagctaacaaaaagtagagagacaggaactatgcttagaaaaataagtctagaggggatatttagaaaattaatgatttgtataattcataaccaagagggttaagagtatctcacctttatgtcctcatttgcaaaataactacaacattaaagaccatacagaaaagctatgttatatctttgaagattattatattaatacatcttatgaatgtggaacattcaaatttctgcatgtcaacatcactctgcaccgttcctgctatccttcctttaaagactaatgcttaaaatgttattgtttggggggtaagaaagcataaagtgaaagcaaggtatgtattcttaactctgaattaaggtctaagatgcacagcaacagttctgagccttgcgttgttattgaatgtattcagggagcaaaagaaacttctaattaaacaaatgccactgggtacaaaatttaaaggcctgctctgagtgaccccggtcattaatcctaaacagaaaatcaatgtgtacagaatgtttcctgatggattttgctcactccctttcccagtaatacttagctgcctttctgtatgatgtgcacagctctctggtgattaaaagaagcaaatacaaaagggtctgtgcattagctctgacctaattaatacaatgtgtccattttcacagtggacctgcaggcaaccaagcaacaccttcctccaagcaaatcagtacatcttgtggatcataaagcttgggacataaaatactagctcctacaggggtctttaataatgcagacccccattttacccagttgaaatatttacctgtgtactagcttttccatgataatctggggtaggtacggagcttggcaaactgaatataagtacaagcattctgatttacacagttaagaacttgtattatttcttttttaatttttaaaattttttcctttgtgtctcttattttttttctgttttccttttccagtgagtttttatttaaaagatggattaaggaaggagctactgactagaataatatttaagaatgatttctctagtagcaggtatgaagttgaaacacttactgtaacttatgatacccatatttacaaagtcagattcaagcacaagtgtggtcatttgttttagtccctttaatatttgtcttccagcttttgtcgtatcatacatgagttttactctctctccaatgaacactgcactaattcactcattgaacatggaaataaaaatcactccaaaggtcttaaagcatacaagcaatggatgtgttgttaaaaaagaaagcataaacagctgttttaaatttgagtaaatgaagataacctccattatgacttgcacgtattaatacatgtaaccattcactacattgtactatcaagttaatatgttactgacattataaacactattatacaatgctgcaagaatttatcttaagttcaaaaaaatacaaagcatatgaccaaatgaataagtgggaattgacattggaagaaagaatgtagcctataaagacattacatgtattcttactttagttcttggtcttaggcaagtaaaaagattggaaaatcatattttctcaaaactatacatattttcatgcctactttcatatatatatatatatttataaataagactgcaactaccacacttgctatgcacattctgccctgatgttttgttacacaagaatcagaagtttggatagtattgtacaagttttgttccttgattttgttagagctagtcaacaactaagctatctataaatgcttcagccccttgttttccatgatacaattgcttgaagttgcataaccattgtcatattaattgtaaggtttgtataatattttaaagaaatgatctagccatcaacagcacctctcttcctggaatctttctcccaaatctactgtcaagagtttttagtttttttctctctttatagaattgttcattcattaaacttcatgtaagtgaagttctgtggtgtgttgtctgtgactgaaatttcattcatacacgttcattcacagtagaacatgtatgaatattctgttccttgtctaagccttaatgttactccatcttttagatgcattacatttcctctgtacatcagattattgactcttatcatatttactgtcttttttctattcagaatgaagttaataataaatattttgtatatctttgcacagttatatatgtcaattattatgtgtattcaaataggaaagaaattcttagtcatgataattttatgttagcctacgtatcctagtaggtgtgaaatggtgttgttcaccattcaagctgatggtctacagactgagatccatgtcagccaggactacacagagaaaccctgtctccacaaacaaacaaacaaacaaacaaacaaaaacaaaaacaaacaaaaaacaaaaaacaaaacaaaaaagccacttcttcaatggctttatatttttgtcatgcacatcgctcacttgcttggtaagagttacctcaagatattttatattaattttgcctattgtgaaaagtattgtttacctgacttctttctcagtctgtgtcatttgtgtataggaggtttcctgatttttgtgagtttattttgtatccagaactttgctgaaagttttatcatctgtagggtttgcttgctggaatgtttaagcttatagacaatatatatataatcacattatagattattattgtgtatatgcatatccatatacatatatgtagtatatatgtatttgtatatatacaaacttatacatatgcacatatatagtataaacatacacacacacatacatatatatatatacatatacatatgtataatggactgcaagtaaagaccctttgacttatttcttttcaatatcaatacctttgacctccttatctttcaattgccttattgttctagctacaaattcaagtactatattgaataggtatgatgggagtggacaactatttcttgttccctattttagtagaattaatttaatttcactccttttaatttgatgttgactacaggatttctgtaaactttctttattatgttcaggtatgtccactgcatgtagaatctttccaggacttttatgtcaaaaaaagtgttggatttttgccaaactcatttcttcatccaattagatgaacatgattttctttaaatatactacaaatgagtatctatttttatttaatgttcaggaccttctttctaatatttgttcttttttaggctcatttacttctagatatttcagaaaaaagaatgaagattagttggactaagatgatcactatataaattttcttttcctatgttttatacaatgattcattggcattgttgaaaataaattatcttctattttattgaattggtattgatctcaattttattgattacttattttagaactattttattcttctctatcaatgctcataccaataacatttcaagcaatcagccctaatgtaatcagtaattaaaattatagccaactacaggtgctggtaattgttaatcaattagatgcattatgattgcagatttaattggagtgctgattaaagtattgatagttgttcatgcttttcaacattaaataagattatctttctgtttttaagtaggaagcaggcagatatggagaacacactcccaaggaggtttacgaaatttcctggacacagaaggatctctaccaaatatattcacaaatatgaaaaaagttaattccacaaatcagaagcagttggtctggctagtggatgaatatgtaaatttgacttggctttttgtagattagcattaactttctatatgaacatttcagtaggtcctatttgtctagatttggaaaattctggtacatttttataggaaaatagcagtcattacaaactgattgtacctgcatgtggccatgatgctgcaatatgtatatgtatgtatgcatgtatgtatatatatatgtgtgtgtgtgtgtgtgtgtgtgtgtgtgtgtgtgtatgtatatatatgtatgtgtgtatatatataaattgatgcagaggaagcttttatggtttgcttgtttgtttgaaatctaaaaatcaggcatgtaagttagacatgttggcgctaacccacagtatcagcatttgcaagacaaaggaaggagctttgtgaattctaggccagactgtctagcagaaatctacctgagaaatcagaaaataattacagatagctgtgtaaagtaggtgatgtgatcatagtattcctgcctccccagatccagcatgtgctggtgttgttacctatgtaccaagaattgaaaacattttgagttcacttttaagactcatcttccagtttaaaaaaaaaatccagtactaaatgaaatgacattaagtatgttaaagaagatcatgaaactcaacaccacaccttccaaaactttttaagaagcattatttcatgtgagcaatgagaatgcctttttgacttgtgtgttgagaactggacctgtgaccatccaatcaaataccaatcttgccattaacaagcataggcagctattttatcattctgtctgatttgaccatatgccttttttatgatagcattgtatatgacattgcctttaatccagaaactctattgacatctgtatatttatggtttggatataaagagtacatagtaaattataccgtgagccagctgtctgctggcattacctaaagatgaaaattggagagagccattccatttaatacaacctcagcaagaatatttatcaaaatgtctcctcccctcatatccaacagaagagcactatcagacattggtggctctggaggcagtcatctgtgcaggtgaattatgtgaatctgacctgtaatcttacatgacattttaaactcaaatattttcccatatttctccacacaattaaaatatttagtctcacttcattttatgagacataaatagctatgtaagtactctgtaattactgtacattgtaacaaatgacctcataaatacattgtaatgtcccatgtaattacatggttaagtcttgtctttgagatggctgctttccgatggaaagcctgctagtctctgagattaattacttcgggactaatttgacagtttgcttgaagatatgcttccattaagtagccacttgcactgtttttaaaggaaaattgtttcataatatgctctcatttccttcctcaaaactgacctccgtgtctgtgttcatcccgaaatattagccgtgtctaaatgtactgtacacaaaagccagagtggcataattctgcagagaggaaaactaaatagcatttatattttccattaaatactagccagaaaatgtgagagtaattttaaagtttttggtttattacttttaaaacatattggagtaaaacatataaaaataacagtatctattcttggtcaggcactgggcaacttatgtttgacttaaaaacctgagttgcagtgacatttacattttagtacatgcttctaacattttgagtttgccgtgttattcttaataaacgggtatacataacaactgaagcaatcattatgaaagctttgtttctgtttcacatgggatattcatccatctggtaaaaccagcagcagtgatattattcacctgactgctcaaacaataacttagtttcagtattacaaaacagcagaatggaacaagaaatcaatgagcacactattttcgtcttaaattaaatatgtcttgtattcttgtgcctttgaagtgtataggtttacatacagctccctcgatgggttttccacttttcccgtattactccaattccaaggctattttatggcttttagtggcttcatttggaaggaattaatagtctgaaaataagacttagtgatctccaagagtcaatgacggtccctaaacattcaccatacttctagggaatgacttaagcactatagggtaaaatctattgatactgacaaattctaaaatgattgcttataagatcactatatcacccactctggagagcaacaaaattgctttattgtaatggaattttgtcaaaatgtgaatacctcctaaaattatattttccattttggggctcagaagcaagcaggcctggctactagactatgtatagcaatagcaaaatataatgtgaaaatgctattttaagttcagtatcttaaaacacaaaggagttacattcatacgaattcagcttctttgttatttgttcgttcccgtgccctctctctattttgtagtatattttgtattcccagtcatatttgttatcagtttacaagagttaggataattatatgtcgttttggaagacatcttaggtggcaggaaaatttaattgattttatcccaataaatggagcaatacatgttcatatctgagaactggaattgggaaatgagtaaagtatttctgtactacccgaaagattatggcaaaatcaaccataaaagaaacatctcttcacacatttcaatgaatgtgtttagactatcaaaaaatgctgggttttgaatatctgtatcctacttgcaatccgattaagcttttataaaggtaattcaggcttttattcattcatttttcagacttaggtctgcaaaattcaaacacataaaagaatatgtcttggggacccagcatttgtaaacttgctctcattttcaccgtagttttgtatgtgccaaaagtgacatacgttcaccaatgcgggtctgtaaagtaaagttaaaacaggaacaaagcattttatttttgcaatacagggcttttctatgctcttttaaaaagcaggacaggatgcaaataaaaacctgtggcacgcaatgatgctgttgggcaaattgttctcattagcacttaacaaattcctaaaaactttgaggtagactaagatgtctctggcccatccatgttactattcttagtgaataatcttttgtcagcacaatattgatctctctcttcttaaataacagttcagaagagaatgctcaatagagcataaataaatagtattttctctgtacaagatatacaaatttagaaggcccccaactccatttctatgtaactgtgcctagcatctgtttctgtacttatcattagctttaatcattagatagattttgaatgtgtattatatagaataaatgcataagcttataccagaattaaattaacctgatcattctagaggctcctatatagacttcagaacttcaaccaccaataacagtttttaaacatcactttcaaaattaaatttgctttgtgacaatttcatgcattcatataattcatattgattgctctcagcttcctcattctcttaactacaacagtatcatccctgcctaccttctacccaccctcaataaatctctttctcacattcctggctatgttttctgttgtgtggcccgctgagtttaaccagggccatctatgtaatatgtgtttggagctctttactggagcctaaggggttcggcagcactgcattatcgaaggcattgacttcttttctcccagaatccatcagtattcaatggttcatcagtaagaggtggggcctcttgggactcgtcagttgcaaattcatgctaaagattaaacgttctgtgaattagtggtagctgtggttgtgtcacgcctagaggctagcatttcgtcttgtatacttgctgttccttctgtactattctataagctgaaaaagggatcgtataaatatcttgcattgggatggaccaaaaccatcatctattctcatcatctttggtaaccatgagtctgaatttaccttaatttattgcaaatagaggcttctcttattaagggtgagagtatcttttttttttgtctataggtatgagtagagatacttagaaagtgtgttaatattaaatcaatttagttaaacaaaaataccaagttcacatctttgacctaagttctcttcaggaagggattgttggctaggattctaatatgagaatgggttccctcttgtagagtggacctcaaacgaaacacagggtggatagttgtcaccttgtcattcctgcctcagttgatatagaagtagtcatactatttcagtcactaaagaagatcatgacaagttagtttctattttattataaaacaatgtagtgtttcttttatgaattaaacatgactataacattttagttaaaatcagatatttctttatttgtatgtaatcattcattcaaaaacttcctaagtttataaagcagtgataaacttcagtcttcacgagctttgatatgaatgtgtttaccaacttcccaagctttcattgtgacaaatagtttctcacacaaattcacaaatataaatttagacatgcaactccacattttaacatcatttatttagaagactatatatttttaataataaaataaagcactacaatagcaagaagaatatatagactatcatggcatatcattgacatttttatcaaatttacacttttttagcacccaatttttacaggtttacatagatatcccataaaatttgtaggtgttatgtagtttattaaaaggaagaccaggtttaggttttgttaacaaagttatactcataattgagcttaaaatattacaaagtagtaaatatgttctagttcaaaatccaagtagatgtttaagatatctatagatgttatagtaaagttatgataaaatccaaaagttaaactttttttcatttttattggatattttctttatttacattttaaatgttaccccttttcccagttccccctcccccataaaccctctatcccagcgcccctccttctgcttctatgaggatgctcccccaactacccacccactccagcttccccgcccttacattcccctacactggggcattgagttttcataagaccaagggcctcttcttgcattgatgcccaaaaaggccatcctcttctacatatgcggctggagccatggttcctccatgtgtactctggttggtgttttagtccctgggagctttggagggtctggttgattgatattgttgttctttctatggagttgcaaaccacttcagctccttcagtctttcctctaactcttctatcagggatcccctgctcagtaaaatggttaactttgagcatctgcctctgtatttgtcaggatttggcagagcctctcaggagacagctatagcaagctcctgtcagcatgcacttcgtggcatccacaatagtgtctgcatttggtgaatgtatatgggatggatcctcaggtgaggcagtctctagatggcctttccttcagactctgctccatactttgtctccatatttgctcccgtattttgttcacccttcttagaaggaccgaagcacccacattgtggtctttaggtgcttcttgaccatttggtatccttcagttgagaattctttgtttatcactgagccccatttttaatagggttatttgattctctggagtctaacttcttgagttctttgtatatattggatattagccatctaccagatgcaggtttggtaaagatctttctcaaatctgttgattgctgttttgtcctagtgacagtgtccttgttaaatattaaatgtcatcttcatgcaattgctaagtcatacgtgaccattagcatttactcacttccaggaacacagtgaaagcttttctcgattaagaccgacttcttggaaggtctataaagaattgtcataattattttaacagatattggaagagtcatgttaactgtgggtggggccattccctcagtgggaggtcttcagctgtatggaatgagattgtaagcggaacacttcagttatcatttgttttttccttctttagtctgactgccttccgctactgcttctgtgccttaatcagcaatggtgaactataacactgagctgaaatgaacccatgccctcttcagttgccattatcacagcatcagaagaagaaaacaagacattctttattatgatttcattactgacactctttattctaaacaaaaagttgggaaactgtccttagctgtttctacattttgacttatagatttctgtaatagttttcatctagtgtaaaataagcttatttatgacaggtaagagaaacacttgtctctgagtgtcatgataagtatttagaatatgtattatattcatatgattagatattatatctgtttaggaaaatggcagcagtaggttcttctttagatccttgacatccccaactgcaggtatttggctacttttacagccctagacattgattccctcacataaaatgggctttaaatccaattagacagatgttgccccaaagatataacaccacgattgaaccactggagatatcttgttggactagccacagttatggttcacgggttttacaacaggatatgtaggactatggattgcttttctcccttgataactttcatagcatcttctgagcttgtgtgggcttgccttgtgggagcagggaaccagatcaattatagcttaattggtttatatcttgtgagttgtgttaataacaccttaagattatgctgtcaataacgacttaatattcttggtggtagtcaagtaaaatgtgtatgtatttaatatttccctatgtttttgaaatattgttagtgtaggtcctcactctctccactttagcttatctctcccttgtcacatttccatttcctctttcagatcatatgtgtcctaaagtctccaatccctagacatctccaccatggtacttttccctgtcttgtattctatagttatttcagcttatgtccttatatctacagactcagaggcagaagctccaaattagaaagcacacattttgccttcctagtcctacctaatctttgtcactataatgttttctattaccatttccctgtaaatgtcataaatccatttaatttacaactgaatagaattctattgtgtatctataatacatttttaattatggactcatcagttgaagggcatctaggtcgcttccatttcctagggactgtgaggacaacaccaatggacatggatgtgcctgtggagtgggattgttgagcccagtatagctgactaatatggaagatttactgttatctttttttgaaaccttacatgtttctatcaagaatggctagagaagtctacaatatgaccagcaatgaatgagagttgttctctccatgcatgcttgtcaggggttgttgtcagttgtttccttgatcgtgaactgttttggtggagcgaggatgcaatctcaacatagatttattttgcatttctctgattgctacagattctggtaactctttaagtgagtcgtttatctgacagtttcaccccagtgaattattctaatctactgagctgcttatgtctgacacataggcttttaaattattatttttcctctcactgctgaaatttggaaaaatagccaaatccatttaaatgagtttctagaaacatttattgagtaacttcccattttgtgtattactgtagatttctgcttgctctatgctttcccactacccaggcatgatgtttctatttgctaaaataaaaattgtattccacgagagcaacatggtcagaaaatgtatatgaaataatagcagttcctaatgtgtttcttgccaattcatttctcttggtttctctgtcaatttgcagtagaaaaaaaaatctagatatgttgtcaaaaacaaacaaacaaaaaaaacacaaaaaatataaaaagcaaagcaacaagaacaagccaaaaacatccatatactcaacctatttttcctgtttcgttttttcccttttcagaatattccacttttagaatcactcattgacaatgactgtacttgttgtgtttgtgagcagaggcaccctgtagcatgtgagccttgttagctagggacattctctgtgcagtatgcaaatcaagatctggatgaggctagcacagagtgactgtaactaaggatattcgtgagtggtacaagggatatttactcttttgaagtgactccaggctgtctttacaagaagtgcacgtgacaagatgaagacagagaggtttttctcagtgtctaaaccattttttatgagtcacaagccactataagtacagagaggaaataaacagtctagaatggattttaatctaatccaagatatcctagatccatgcatagctccaacaaggtcattatgagttcttttcaaatggcacttcccagcgccttctataggaaagcttgtcggataccaccacagtaaaataattgaatattttctgagagagtatcacagagctccagatgggccaggtctcacctgaatatcctactagagagctgaaatatcaatttacttgagatgtgcatttaaaaatagaaattggaaaaagaatagtcttaggatatgagcttctgggaaaactcgggttggtgggattatcagttatcttccttgttttcttatgcactatcacaagcatataaatgggaaggcaagtaggctgttaccaaatgatgcccatgaaacagaaaaaaaagctatgtccctgatttgatcaagactaccgcaagaagtttggaatgcaatgaagttgatcattttaataataactaataaacgtaactcttcatcaccatattcactgataccccagagttccccatgttccaccttttttccctacctttcatgagttggaattacacatggtctgtcaggttttgtcatcatttgcaaggttggtagggatcaaatcagacccttatagttgcaaggaaaattattttccactgagatatatccatggccctcttttctcttttaagtaagcttagtaggagattttggggactatattgctatatatatagcagcccaataattctgtgattacaaaaagagaacattgaactcaatggttagaaaatgttccagtacggccacatagtaacctcagggtaagcattaattgaagcctataactcagtaaactccactgggtgattgttaattgttagaagtgtctgaaatgctgaaaaccaaaaactttagatgaccataaatatgaatctacaggattttaaaaattctagtttttcttgttagtttctaaagcacttttagcaaagaacatatttttatatacaaaaattctgttaggattaagcagtgggagacaagaagatagatgggaaattgtgcattgacactttctcagtatgcgtgttggtccaagttcatatatctactgttatctgagacattcttagtgttttagaaaagcatctatttcccatcttgccatccaataaataccatgttctctatctatcagatattttatgacctcaagttgatttacgatgtcatgacattttgatcttactattacttccatttctttaccttgttattatttcctatctttaaatgtcttttttcaccctttccataaagttgtgttcaaatttgaatgatgaacttttagtaaagtgttcttggccatataagacataattaatctttgtatcttgtgcctctgagaaatcctgtttgattcttggcaatctgcctttatagtttatgtctctttcctctattagacctggtgagccatgacttgagttttgcttagtccagtgtatatatattgtgaatgagtaatgagtaaatgaataagattcttaatgttgtgaacttcctttgagaggcaatattaaattgcaatgaaaatccagctttagaatcacagcttccatactgtctcatcaattataggatgcatgattttaagttacttcaccacattacattgtaatttatatgacagaacagaagacaaaacaacggattgcaacttgcaaaattatcagggctataaattcattcatcatctagaatgtgtaccattatcatgtctatggtggattaaatatggtgttaataaatactaaaaatataggggtctacctgttgtatcagtgtatttgtgggagaaaataatcccagtaattccatgttctcctaaagataatcccacatgctatataagttaatcaagtcatataaggaatagtttacataatatataagattgtattttaaatttgtgtcaatgacttacatatttcaactgtcaattatatatttgcaaaactgtggtttatccttgccatttgtagtctgtatctgtgaattgaacaatcactaaagtaccacaattttaatattcatggttcttctgtggtcttgggcaggacagtgaaaattttgtttgcctctatcctgccttctaccttgaaatctcacattggaaatgaatgtatgttttaattagccttttatttttagtatctgtttttattagtaactttataggttttagtggtccttaaatgtagtactggcatctgtttgttcaatgttatcaaatgcaagaagactgtgatgtgccttgtggagaataggaaataagtaagctaggttgggtattaaaaatctattttaatcattcatatcaaataaagtgctttaaaggaaagccacaagaagcctatgttatagacaaattgacgtgcattttgtaataagaacctggaagaaatccaaattactattttctgtaggagcaatgcttcagtattgagaattggaatttcatgaggttttaataaaacaataaatatggtaaatattgaaaatctacactttgctgcattttgtgaattttaggatacttagtaaagaaatttatcttcaatggctttatctccttgtataaaatattcaattattttggagcagcagctatttagaaagtgagataatggtcatggataactcattctttagagagcaaggtcctgcactagccattgtgtccccagtccaaaggaagtggaaaactctggctagtgatcagactcaggagtctatccctggatgtaatgttctggcttctttctaaaacctgatcatttattctactacctccaaagaatgatttttaatgattactcttaaaaataaatgtaaatttctgtcaaaataaccaatgtttattatttttgaaaagttcaataacaccaacaagcatacagcaaagtttaatatgccatgagaagatctgatttttgctttcattcgtgtaaccagcatgaaattggagttgaggaaatttacatcaacagtgaaagttagattgtactcctgtgtaatcaagcccaaagtgtcactgcctctgcaattgtcctgtattttatttttataacttcaatttttcctatcttgtatttagtcaaaatacaattattcagtaaatactctttttgaatgtggtgacaacataccaaactatacaaaattagtattttctttttcttttaattaattaattaattaattaattttttacactccatattttattcccctgccccaccccctgtctaccctccgactattatacatcccatacctcctccccagcctaccctgtctccacatgaacgtcctacccccccactcccccaccccgacctctaaactccctggggcctccaatctcttgagggttagctgcatcatctctgaattaacacagacctggcagtcctctgcttatgtgctgggggcctcatatcgggtggtgtatgctgcctgtttggtggtccagtgtttgagatatcttgggggtccagattaattaagattgctggtcttcctataggatcgcccttctccccatgttctttcagtcttccctaattcaacaacaggggtcagctgcttctgtccattggttcggtgcaaattatctgcctctgactccttcagctgcttgttgggtcttcaggagtgcagtcatgctaggtccatttttgtgagtgctccatagcctcagtaatagtgtcagaccttgggatctccccttgagctggatcccactttgggcctgtcacttggccttcttttcctcaggctcctttccatttccagccttgtaattctttcagacaggaacaattatgggtcagagttgtgactattggatggccgtccgcacacttattaaattataagcaaatggtgtttataagaaccacgatacttaaaggtgagccaggcaggtagttaaagtttacaggaccctttcacaaggaaggatccagtagcacccttaggcagtttcataggatgagtacccagtaggatgaaagtccagacagtggctgggcagtctgcctgggctctagctctggtgtcttatttcctatagtccatttaatataggatttgttcaggccattagatacagagagaaaccagagaaagctgctttctatattatcagaaggcaaagagagaggaatggaggtagtaaaaaaaaattgactcagtagagtaggtaagacatgaaatgctgttcgctgaacctcttacactgctaacccctcctgtcatgtcttgcacaaagataacaacttctatattttgagagtgttaactgcctgtttactatttgttttaattcatggttgacttgaagctatacacactcataatgtgttcttaaaaccctcggaattactttcaactttccatttcttacctttcttaatcctacaagtctttaatttcaatgatcagaattttaagaaatattcttctctgtttgattctttatgttctacactgttgatttttaaaatactgtatccaggcacctctcacgaagatatagctactgtatgaaggtggttcttttatgtttgctctgttaaatactccgtgatctcctttaagctagtcccaaattcttctaccgcttatacattaggcttttattggaaggttaagtaactttatttaccatcttttcttttgtattctgtttcatttgtctttctcttatttgctgcctttccattctctccatttaccatttgcatgttagaggttataaactagatgtcagtgtcttatcctttctctacaattcactacagtctttttccccttcttaattttgaaatatataccttcattcatcttccaatgtatctatagatttttttttcatttctactcccatacttttcaggcttatttacaatctcaatctacatatgttctcattatctccaggatcaagcattttctcctaggctttttggtgtatatttatcgctttcaggctttcaggactcttttgtgagtgttattattgtttctctctggacactttattgtgcacttctgccttcattttgtcacagagtgtctctcagactctgatgatatctggtcatatgaaattactattatatatatataaaatgaagttctaaaactcaaacttgcaaagggcaaacgctggctccaggtgggacttgttaagttatggattcgctgttggggacttaggctggggtcttttgtctggttcaaagttcttaattttctgtagcatagggttattcgatattgcccctagctaacttaagttcccctgtgtactggatgagagaagaaaatacggatgcctcacatctctgacctgataaccctttccatatccctgctcactggtgtgcctcttatctgaatctccggcctttgtgttcaacaactctgagcattgagctccccgctactccaggcagtgagagttagtggactagcatgctggatgtaagaagctacagtttaaatcctattcgagctttccaagtcacctctctttccagcagtgtgccttagtaccatgctcgagttgtagaggaagcaaaaggacccagaattgggtggtttttaaatggaaattagcttggtattcattaatgtattattttttttaaannnnnnnnnnnnnnnnnnnnnnnnnnnnnnnnnnnnnnnnnnnnnnnnnnnnnnnnnnnccaacctgttggtatcactcatctgaaatctcctggatatgataactgatatttcagtggcttttattatgtagaatcctttattatcatattaatggtggttggaagggagacatgatattgcacctaatcagtcaaattatttgtatgcatcggtactaaaataaagcgcatatgtttctgtcagactgtagggaaggatttcacttggaggcaatgccttataattctcacgtctctgttttattcacacttgcgcttgggttacttctctgaccctgcgcagttgtcttcttcctctcttccatgtcttcatttacatttattttatttttattttacagagtatcaaagtaagctggctccctcctccatcgggaacacaaaatggatttattactggctataaaattcgacacagaaagactacccgcaggggcgagatggaaacactggaaccgaataacctctggtacctcttcacaggtcagtgttcccacagtgcagtctggcaagctttggatgaattgaatgctttaggaataaaatacactctcacttcaaaggaacatcgactttttttttcctggcagctgacatttattggcctgaacaagaataacctttatatttttaactttatatgccctgtaatgctttcactatccatttccctctgcatcatcatctcagtaagtgtatcatagaacttttacctatgtcacttctcagaatcgctgactcagaaaactcttactgcctaataacttttgactttttagttaacaacatttaaaaggcttctaatgaaatgcctcctctctgtggtccccctcctcaccacaaatgtcaagatatagtggaaattaacaagaagagggagaatggtgtgctttctataaatgcataagcctgcttttgtagaaatattagtggaattcataggaggttagtagtcactaattaatattcattaatattcacaaaactggacccaattttcataaatacaattttctgatttggtaacatgaaaaaataatgtatttttttttatagttttgcaacctcagtgtatgtttgtctaagttcctagaaggcagactaagagaagtcttctaagcttatctcagtgaagatttatgctcaaggagacacgaacgaacttgggaagtgggtcaggcaatattttccttttataaaatagtgacgcattattgatttgggtggccttgatttaagaataaatgcaaagcttggaatacttcatggcgtgactctgtgaggtcataccaaatgaccacgtgcaagagggtgcacagcctcccttgtctgtcactgggcaagtgtctgactctcttgtatagctcaaagcaagtccctgcaaaccagagcttttggagtgtgctaacaggaactgtctcctttttcatcaccacttgatacgatggtggtagcaaggctttgtgttttatcggtctagaactagtttgaaacatgtctacagccttgagaacaagcatagggtgatggttcaccacagtgattcagagtagatgctgagcaaactagagatggcacttgtattcattagttttctctatgctgtgacaaagtgcttgacagaaatgacttaagacttctttgggtttgttttcaaagagtgtagtgcatcctatcatgacggcatggtgcatgagggtgaggctcacatgtatctgcaatcagaaggacataatttctctatgctggtaatctgctaatattctgatttttcttatctggggatctagaccttgtaaaggaatcactcacattcatagtgggactgccttcttgcctggcaattcattcaaagacatccccagacgtttgccttctgaatgattccagtgcctgtcaagttaacactcaaagattatccaaagtcaattctggctcagtaaattaagtgtttggtatacaagtccaataatcctagattggaccagcagctctcatataaaaaaacatcaggccaggtgtggtagcatagcaactgtaaccccagcactagggcatgtagagaaaacagtcaagcaaacccctggagctcagtagctagccagcagagtcaattaatgagttctagtttacaggagagactctttctaaaaaataaaagaaaaagaaggcaagaagaaaattaaagatcaatagaggaagatacctgttataaacctcaggactaaacatacacaaatacaccatgcacatggacagacacatatatgcacaaataccctgataaacacacacaatgtccattacttgtcacagtgacatctaaatgcataatttttaaaaccataatgtttaatacttgacatacaaaatcctataaacatcttataatagaagataaatttaattcctttatgaatatcctcaatatgtttatggtactaatattgctcaaagtctcttctaagacacaaagcaatcttatccatgagtttatccatgtaaataataattaacaaactattatgattgagtataaacttcacttccaaataccatctttactcaatttttttgtatattaagtattttatcctgtagaatattgtgtccagttaaataatgagccaagcaatatttgtcctctgtcctgtttattgtaaaaaaaaaatgaaaatggtgcaatgaggtcccctgtctcttttttaatctatctatctatctatctatctatctatctatctatctatctatctatctatctatctctgtctgtccgtccgtccgtccatccgtccgtctgtccgtctgtctgtctgtctgtctctctgtctgtctgtctgtctgtctgtctgtttgtctgtctggtgtgtctcagtttctctgtctgtctcttgctgtagaagttatgcatggttcttcctcccaacagaaataagactcagactcaaaatatattataaatgtcttggccacatagctaggctttatcttattagagcataacttaaatttatcccacttattttaatctacattcttccatgtgactgattacctgtgctcatgtactatgtgtctctcttttcacatttccctaggcaaagctcttacctggctcgatctcagacttttcctcctcctggatgtccaactttctattctaccctttcataaataggatattctctctttctttttttttctgagtgtgtgtgtgtgtgtgttttagtagtaacatgtttctcattggccactggaatttttaaacacatattatgggaaaatgaaattatctattgtgttttaaggaaacatgagtaaaccttcaataagttgccttcatcttttagtgaataaaaatgtacttctacatgattataaaggagacaaggggaggggaggaggtatgggatatgaaacagtcagagggtagacccggaggggaataaaatctggagtaaaaaataaaaataaaaaataaagaaagaataagtacttctgttataagaaggaatttgtggtatataataataaaagatcaactgcaagcaagatcaagcagagaaagacaaccaccaaattcttcagctccatggccagcatctagaactcctagagacatcattagtctccatcatgcttgggtagccccacacatctaactcctctacaagctgcaagcataaggtactccttctttgcttgttctatttattctttacctcagctttccacaccattaatgtctctgccataaacaacatcccagctctctattgctttggttttcccctccacagcttaatgctatggaattccacttacagcccaagatttcccccacagaatctaactctgcctgccacaggttgtctcagtaactttctaggacctaggttctaacctccatgatacacttattctctctttcattttgtatacctggaaaaccagcagtacatagagaatgctgcctgctactagctacagatctattctgaatgccatctgtcacagctatcatggtagctgtgtactgtggcaactgaactccctgcggtggatgttttgatcaaggaaaccctttagcacaatagccaattcatgctctcttttcaattgaacttgcaattttacaacttggaacccctgatgagttgccttcaggacatctttactgttttccaagtgtataatagtaggtttctctctggtggcatcagtctcattagcaattacagcttccatttccaaccaggtttgactgcaactttaaatttgtgcataaaatttgactcatgaaaatacacatgtttatatttccactgtctctgattatgtctctgtgtctgtctgcttgtctctgtctctgtctctttctgtgtctctctatccctctctgtgtctccctctctgtctctctatgtctctgtctctcttttcctctctttctctctctctctctgactgcctctcaccaagatgcaacatagagtttgtactctcttgacataataaactatttattccattatctttaaatttggcttcattatttattcaggaaatgggtagaaagcagccagatttggggtataacataatatgaaagacatctagtcgagctctcagtagactctttgtttacctcgaaaacctcataaacatagacttcagcatctctactggcagaagagtcttaatagagaatatgatatttgcaccctctttccagaattgcttggcttatagtattcaaaggctctctactcttcagctctaagttctatgttgtcccacaaatcaattccatgtgcccacatgccatgtgattagtcttatcgcatcatctgccaacaaatagggaccattttctgtatcagttacttttatcaatgctgtgtcatcatacttgacaaaagtaatgtaaggaaataagaacttattccagctcacatttttaaagtagagcccatcacgaatgagaaattatggtagcagaatcatgaggtaatggttgcagtgtgttaacattcagggagctgagacagatggatgctagtgttcagctcttttggtctgagactccaaccaataggagggcaccacctgtgtccagcgtggctctttgcacctcggttaatcttttctggaagtgatgcaaagatattctcagaagaagaactcctgttcttcttctggcaaatagagctgacaatggtatgccattacagcagcacagcatgtgattgtgcgattagaggtaaatgaaatgtatttttgtagtaagtagaattattgattttctatttaagtctacctatgtctagtgaataaggtatcactgccaaaggggagattatccagttatttttcctttagaccagttatgtagcaaatgttatttaaaatcatagcacacacataaacacacacacactcacacacagtttgtcttttccttagccaataatctttgatttcagaataacatagcttgttcacatgaaaatattgtctgtacaatcatatcgtaaatgtttccaattttgactatggaatataatgctgcctgttttaaaaactagacaaaatcctagttgagtactgttgaatttaaaagccagatataacgtccaacacactatttacaaagattttaaaaagtcaagcctatgatatattttcctcaaccatgaagaagtaacatgaacgataaaaataactgatgttaaagaacatatatgcttggtaaagcttgtagatcataatatgacatgtggttactttgagaacaatcacagttttgaaaaatcttactgaagatattttaatatgtctaggattaatattaggcataaagaggcatgaagacatttcattttgcccttttatagaatacagagggttgggtccttgatactttcttgtcaatagatttttttgtcacataaaacattaacaaatattagataaactctgattataaaataatggataggcatagaccagagacactaagaactggaaattcaattttaaacactctaaattgccaataaacatggtcaaatgttcaatcttgtttgcaaatggagaaacagatgttaaattagtgattattttctttcgttgtagtgacaatgataaaagaaagtggcagtatattcaggaagcacacgagtaacagcaacttccactctctgcataacaccctagaatgtcaggggaagcacagtttatgtattatatgcacatgcacataagcatatgtgtgttgtgaattcaattttttaccacagaggtaaaatacagacagacccagttttccaaattttaggacttattctaatgtatacttctattcttacaatacttttaatcaaaaaatattttaccatagagtattactttcctagaaaatattttttaaaattataaataactttagctaatagatttttttttaaaaaaatcggtcctatcttgtttatcgaaagttatgtggaataaaaaagtaataagttacacattaaagatttacacatcattcagttgtatcgtgctctcttaaatccagaatgatttcattatgtctaaaggatatgtctgcaagtgttgttgaatgctgatcctcatgctatgtataaatttgggaaagacaccattcaggccattacaatctgtgttatttttccctctagcccaatcactttaaattgcaccctccaatagcatgtactcaaagataaataattcatctctatgtttttatttctctgaaccgggtagaataataaatacatatgatcagaatggaatagcccatcactaatccagcttactaccccactgcccaatgaaaagacaggatatgaattaaatagtttatttttcagaatggtttataactatttgcctctttaaaggtttgaaagaatctggattcaaaaatgtagcttttattcccaccattacatctttgtggcaagaataagtgaaatacttttgggaatttaaacataatacaagcaaaaagatttgtaaccgcatctgctgttagcctcaggaatgtcacgcatccttctctttggacttgaacagaagtaataaaaacaatcagcaaagcctgtttgaaagagcttttgcctttcttttccgtatcccatggctcatactcaggatcacctgttacttttctagacaatttgaccatgctttcaaaagcatcaaggagccagcaagtattgcacacttaaagatttactgtggtttaggctttcccccataacatatctaggatctggtatccttattgttagtaagtaaagtcattgattttcaatataaatccacaatgttgtaaaatgttcaggatttgaccccatgttttcaatgcctggaacatattatagatgtattgatttggatgtgagaaaactggacatgctttaatgctttcatattgtatggtataattgaagggtagaaatgcatatttttatttacaaagctgtatttgttagacaggtgtttttgttgtgttctattttttttctatgataatgagacatctgcaataacaaggtaattcatagttctaacaaggacgtcaaattgcaggcaccagtctcgtggaaacccatatgaactaaatttgagagtgatgtttttaatttttgagtgatcttctgtaaaggttgtttgacaacggatttaagagagttctcatatttcatggccaatatagactaaagataatgataaacatgcattcgtattttatgggctgaaaactgggaacagcacagcaattttctaacaaggatagcatgagagaaatcatgctgcttgaataagatataccatcttttaccatatggtgtataaaattagaaatcaaagagagaaattatagtggttaaaggctccaagtttgaagagtaacactactcagggattctttgttttaatgatagaattttttgactcacaatagataatgcaatgcttacatcagaatgatcttaattcttaaaagcctttggactcctacacagactcatagacatagagagaactgagctgagcttcaccctggtacccaacactgtagaacttccatgatgcacgatgcccaaacccttcttttttgttttctgggttttgttgttatttttagtttttttgtttgtttgtttttgttttttaaacagagctacatttcacaaagaatggtctgagataattataatgaaatgtggatctctgaagcagaacttcatatccaagtgtagaaattctgtttcagagaaatccaaagtctgatattaagacctctcctggtgtgattgtttaaacaatatccataacttaagactacatatggaacgaggcaccatccccaagatctgtgtctggaaacatttgattattgctccaaatcagtggagaccatagtccacccagttggcacagaaggcgagtggtcacagatggccttggagaggagttgctgcacagaagattaacaccactgcttgcttatgcattgtgagcaaaagtgtggtaaaacttctccctaactcgggaaactatacttttggtgaatttcaactcattctcagaaaagacctctaccaaagccattacttccatgattgggtaaacatggcttcctggaactctctccttattgatcctaaaatttcttaggaaaccgctgcaatacctcttcttaaaaatcaacagtagtgtttatgagtgagtagcaagatcaaatgattataagttttcttgaggggtgataaaattctcatgttcccgaaggtcttataatacccatcatggtgtcggatgttctattttaatctaatatttcatttgcattgattattgttgtgtacatacagtgctagtggatatgtcaaggagtgattacataaaaattgtcaaagtaccaagcactgtagtataggttatgggtacacagtaaacatatcaatgttaagtcaccaaagagaagtcaccaatagcaatccaggtacagtgcttatccaatttgtaaaagcagaagcttctctagaaaacaagatctctaccaaacgtttgtgtggattaatttagcaaatagatttctccgtatgtgtaacttacatgtaagctttgaaatatcagttcttaaatatcatctgattgacacaataccctatgaggaggaattcagaaactattttggtcatcttttggttaatctatgcaatgatcaaataatataagcatcatctctcagtaatccattttacttaacatttcatatgaaatagtggcactgtattatattatcaaagagaaaaaatagaaaacaaatcaggcagcattctaatatctataagagattttcaactaattgagattaaaaaaaaaactaggcaatttacattgagttttcattttcttaacaatgacccatgtttctttaaaaagtattaacaaataggaacctgacaaaatactgagtttcactatgacagtttttatgtgtgtagaatatattttatgcatctctactattataatgggattgtactaactgggtgcttaataaacaagcatagctgattctgaaccctggcagcatggtaccagtacatggtgaaagttatcccatgcaggaatatgaaaatgcaagcaaattcacaaaaaaaaaagaaaattgggccaaattcatcattcatatcaggaacttattcttgaagtgactaatcctattgccacaagaacattaattcatggatgatggcgaatgtttcatgatttaatttcatctttatttctcttataattgtaaaaaaatgatatttctgttatttctaaaataatcttccatgccagtactgtggctggaatataatacaatatgatataatacaatatgatataatacaatataacataatgcacccaaatagttattgagattgaccacaattttctctacagtgggatctgtagtaaaatatactggaagggtggctacaaaaacgcaggccacagattcaactgactgggtctcatagagtcatgtaatgaaaagctagcctataggaatctgatgtaggttccaatcatgcaggttatgcatgagtagcttggtggtcttgtaggcatcatagcaatgggattgggtgcttcactgacatttgtctgctattgtggatcttttcctcttaccggttggcgttgtccagccttgatgtaatggcacctgtatgctcttatggtagtttgttatgctctgttaggttgatgtgtctggggggtggcctgcttttttctctgagggaagtaatatggtgggaagtggatctgggagagagtgaaggtaaggagagaaactggggagaggaaagggaggtgaagctctggttgggatgtaatatatgagagaagaattttaaaaaatgaaagtgtttattttctactaaaattcacttgctctggtttcttcttccttgccctcctgtgaacataatcactgaccttgaatgaatgatggagcataaatttttaagttgactgtttgtgatttataggcagggctcctcagaactgtgaggaaaatgactcttgctattttttgattatttcttcatcattcatattttatattctgcatttaccctgaggctcttttcaatgatacatttttataaactgaaaaaatgcacaaaattttagaatttatgagacataatttcagttcctgctatgctatttatcctcttgtaatcaaaataacaatacttatcaaaacaatcacaatatttaaatcataacaattatagtcataattttctaaaagctttgaaaacccatctggaaatgcttgctgtttggtaattttttttctggtggaatttgttttcataggattggagaaaggcagtcagtacagtttccaagtgtcggccatgacagtcaatggtactggaccaccttccaactggtacacagcggagaccccagagaatgatttagatggtaagacctcaggtttctagttcttagtaacctcagtttcattggtcctctaagaaaatttaatgaacttcatttctaaaatatatatatatatatatatatatatatatttgttttactgctaacttcagatacacaaccatacaaaataccattcctgaacattccagaataatgcctaaaaatagtcttatggccatgactgtacattcatggtgggtctcatcataagtggcatttttgcataatttgaatatttaattgcctctactagcatttatatttgacaccgtttgatgtgtgattatatgttaagggtttatataaaatttgtgtaagtacaagcctgaatcataaaaaaaaaaaaatcaggtgagaaattgttcttgatgtaaaagtatcatggctgaataaaaaacttaagaaaactgagtaaagggaatgagaaataatgcttgagtcataaaatacatagatgcttcacataatgaagattaaaataaaactaaatatggaatgaaaataggagggaaggggaagaaaatctgttaggcattcaaaactaagaccaggcaaaattgaattaaaattaaactccagctatgtgttgaaaattttatcaaacaataatgatccatgagaaactgttagtttgtaactttggacatacaattatctgaggaaaaaataaaggataaaatgatataccttttttctttcctcctcctttttccttcccgtggagaataagaatgttcttattctactttttttccaataaactcgaatatttcctcttagatacttgaactctttcctactctcttacccatcttttccttctaaaagaagccattgttctgcttatggttcagatttgatttaattaaaacaattgtggtgtcatacaaaaaaatgggcagatgatttttccacaatggtgatatacctactgtatagtttccttctctcattaccttgaccttggcaggctaactcatgcggagagtgaacatagtcgtcaaatggagcccagcacgaacctacttaaagcagaagggacctgttctcttttatagttctaagctcttatggaaacattagcacaagagaaggtgcagaagagctggcaacattgcaacagcagtcactcagcagaatgcaagcagaatgaagactcaggatctacccttgtgattcaattcctcctacatgactcttaagaaagaaaactcctacagtctctccagatagctgagaatcaaacatgcacacatcttcatgtgcacgtgcgcatgcacacacacagacacacaacacacacaaagtgattctacacacacacacacacacacacacacacacacacacacacgcacacacacagcatctgggtgccatttcaactacagaccaaaatatccattgaaagactcgtttacaacaacatgctccaaaataaacttggtgtgctgctctgaggatcaaatactgtagaagaagacatatttatttttccttctagttcaaagtataacagagacctaaaaggctacattgtagataatcattaggaaagagtaaattaggttgaattttatagtatcccaaaagccaacgcttataggtgcataaatgaggaacacattagaactgagggaggcttgaagcttatgatcttgatgactgagtataaatacattctttggcaggataactctggaagagagtgagttagaggctagcatagtcggcagatggagaccatttagcaaaagcatcaccagcaaaaagaaaactagtactgaaagactaatgataatttcctataaggcgggtattagtaattgagtataaggggcagagagtgaacaaatgcagggtttactagagcataagcaacataatgttgcagcacagaatataaacaaaaattaagaccgagacacattattaagtttgtacacaagttgacgacactgttttgaccagattttgaatgtttcgaaattttaaaatattaagatttttctttaaattaatcttatttatactaaaatcatcattaatttgtaaaggagtattacagttataattgtattttgcaaagatggcactgaagtactaaaatgtacttgctgaacactaacattgattaggccaacactagacgtttgcacataaataaccataataaactattgactagtgttgtgtaattgtcacagagtccaatttcacagggtacatatttcattaataggtatgggaatagtttacacgtatgattgtgttagaatagttctttttttctggcaaaacaacaaaattcctgctctcaaaggagagcattttattcagctagacatggttagtaataaatacttaaaaaaaaaacagagtgaagtgatggtaaaccattagattatatgcagctcttacagagactctatacaccatcaccaacattacacacagtcacctaaaactccaactccagaagcacccaacacttctgcctttaatagcacatccattcattctcacatagccactcacatatataaacagacacatcatttaagttaataaaaatactttttagaaaagaaaaagaaagaattatagacaaaaagtaaaggactatggtatatcacttcctatgggaaaaaaaaatctctcagattaggtaaaatgtagtccagactattaaaaaaaatgatgagcagccatgtggatatattagacaacaatcttctgccataaaggaaatctgatgtccttaaacaggtactacatttgcaaagaaatcagagcaattggacttataattttgagtgctatcttctgttttatttccataattgtaggttacaagcagggttaatttttctgttttatgtcaggaagaatattcaaagttttgtgccgttctttttttgaatcctctcatccatgttcatgaagtaaatattcttcattttagttcaaagaattatagcaacctaaaattaactaaattgatgaggtcagctaggacctcaaagcttgcactcaaggtccatttctgtgaatccctgcccagtgctcagtgctcagtctccactgacccccacaactgtggatgtaggtggaaatttatgagctacggtgattcaaggcgaacgactctaagaagtgagatcatatcatttacccccaacccagagaccatatctcttactggaaggagtgaaaataaatggagcagaggtacaagaggtcctataaaatatccagaaaggaaaggcctctgcacttgacttatacgctctttccctgactgcaagtgaatcaaatttcaagtggatccaatgtagaaaatcacagcttcttggatgaagcccaacctttcctcaattgcatgccttctttcatacttgtgccttctccatataatccacttcatacttcaggcataagcattaatctgaatgtcgttctcatgaggagagccatattaaaggcgtctgattattgagttttcctcattctacctctaagttggtctctcctctccatgcaatattcctccttacatttggcttatttcacttctcatgcgagcattaggaaatgtaattaagaacctctagagtgttgagtcagggggagcacaaacaagaaattggtaagaaaggctctactgatgcatagataatctgtgcactggctggaaactatttcattaaaatgagtagaaccagaaacggtattttaaggagagggtgttttgacaagtatgattaaacagaaaggctctcaaataatattttaaatcatgtcttttttatatatatattcttgcaaccataactggccctgaaaaaatttatactcatttttgtgaattgttagaattttaaaagattatttttattttctgtgtttgagagtttgccaacatgcatgatatatatgtgtatactacatgtctggtccctgcggaggccttcagagggcatctggtgccctggaagtagaggcacaggtgtttgtggtgcaatatgggtgttgagaaccaaagcagagtnnnnnnnnnnnnnnnnnnnnnnnnnnnnnnnnnnnnnnnnnnnnnnnnnnnnnnnnnnnnnnnnnnnnnnnnnnnnnnnnnnnnnnnnnnnnnnnnnnnnnnnnnnnnnnnnnnnnnnnnnnnnnnnnnnnnnnnnnnnnnnnnnnnnnnnnnnnnnnnnnnnnnnnnnnnnnnnnnnnnnnnnnnnnnnnnnnnnnnnnnnnnnnnnnnnnnnnnnnnnnngaaggaaggaagaaagaaagaaagaaagaaagaaagaaagaaagaaagaaagaaagaaagaaagaaagaaagaaagggagaaaaggatgttacaaacatttatatcagattctttgaagcataatggaaatgaacagtgtttagaaattttagttataaaaaagtaaggcaagctttaatctctctatgggttagtattttgttaactataagacattaaatatatgggtcttaaaggcttctcattttattgatccaagatgattttttgttaagacctaaaaataaattagagctgacttctttctgattttcttttcattgcatcattcaagtcaaatgtctaacccttaatataaataattctatcaatgaatggaccaacttgatagtcaccagaatagtatccagtatccagtcagacatgcacatacataatacacccactcatggtcacacatacataattttataaacttttaagtaaattatactttatttaaatatttatctcattttcaataattaatgtaaattcttaaattataaaatcacatgaaaatgacttctaccccagctttcagagctgatgttgggaagatttgagtggaaattattcgaaggaagaagaagaagaaggaggaggaggaggaggaggaggaggaggagaaaggagaaggaggaggaggaggaggaggaggaggaagacattgaaaagacattgaattgctttgatctgggaaacagtcattttgaaaaacatataaaatagaaagtctggtttacatagtgaaaggagtggaagaaaccagggccattagcactcttggcgtatacctgctatgtatccatctccactcccaagtctcctagagactcccaaagaaatgcattcctgaccatgactctgagttttgaggccctaagcagaggcatttccagactttacagtcattccttcttcctttcttgtactctggtgcttttctttctttcactagttggtttaatctttggaaatgagcagtgacttggagagctgctgtaatcctcatgggttgcccatttaattaggatgttttgttaaagtaattataaatccaaactgcactgttccttcaaggtttcctggaaatcacattgctattactgacatctgggaagttctgaaatatttattttgtgctttagattttcagcttaagaaatccaagaacattaaaattcaccaaagttcttaggtacatgctttatgtaaaaaaaaaaaaaaatagtggaatttttttgataaaattcaggaggtaaccttcagaaaattgagtctgtagattgccatgcaccattaatggtgatgtgatttatattaatttcccccacaaagtggagttgcctggataacacaataataacagttcagagattcctaaaagtatgacagtgatgtagaaaattgggggaggacctactctaacttcctgctccaaggaaataggtaatttcccctattatcatgaagagagactcactgggtattcatttcattggagacatgaaccaaggcaactaagtgctttggaactagcataatatgtgacaatatctgagggcatgcatagagaaggagcatacattcaaggttagaaaaaatgagacgctgaatattaaaactgtgatgtttacttaagaatcatttatgggctggagtgatggctcagtagttaaaagcattgtctgttctcctggcgatcctgagttcaattcccagcaaccacatagaggctcaattgggatctgatactctctccttgcatgcaggtgtacaggaagagagcatctacatatgcataaaataaatacatatttttaaaagaagaataatttcattaaaaatatcccttagaagaattactaaataggaaaatgtgatccttactaaattgaaaaaaaattggagaaaacaaagaacagtgaagaatatatgagctatgatacgttgtagaaaacaagaacagtagagaaatgagtagatagctcattccccaaaactctgagcatcaatccctgaaaacctatacctttcatgtcagcagatgcttggtaggtatgagtcattgacacaatcaaatatacacataccaaataagcctacatatcataagggaaagtatgtttctgatttattttagctttgtgttagcaatcttatttaagttcagattgtctgaagacaatgaattttgagcatgaaacaagaaaaaagtcaaggaaaaggaaaacagaatatttattaatttccccattttctgtgcactaatacctgacatgaagcaacttagtgaggacgagtgaatctgggctgatggttttagtatttatagtattaaagacacatggggatagaagtgtgaagtatctggtgatgttctgtccttgccaggaagcagatggtcgtgcatgctatgttcattgtggttccttcttttcccactttcgtgcagtctgtggtccagtccatgaaaatcccatcacaagcaaaggcatctcccattagtgcagtgccctaattgtttcttaatccaaccaagttgaccataaaaatgaagcatcataagcattattatataagtgaaagaatggggatctcatctgaaattccatagccaatatgagactataacaaagtgctgaagctgtagctaagtagttcgaatgcttgtctcacagtcacagaacaaatcgtgcctttgaaacttagcactgtgtagagaccaatgcctagaatcctaacactttgaaaacaggatagtgtggcagtttgatcatgctcagcccaaggagtggccttgttgaagtaggtgtggccttgtgggaggaagttgtcactgtgtagataggctttgagggctcctagtgctaaaggtccactcagtgctgaagaatcagtctcttcctgggtgccttcagaagaacatgtaaaactctcagctgctcctgcactgcacatgcctagacactgccatgctcctaccttgatgatattggactgaatctctgaacttgtaagccaacactaactatattttgtcatttataagagttggcttggtcatggtgtctgttcacagcaatggaaacactaacgaagacagaagctggtaccagggactggagtattactgtgataggtctgaccatgttttctccataggagaaatgtagaatttgggacattggatttagaaagtgatggaatgctttaaatggggcttaacaggccaccctagtaggaatatggaagagtttattgctgagagtgatttaatctgtgcagacctggcccaagaggtttcagtggagaataatttcagtatgtggcctacagattgtttttatggtattttggtgaaggatgtggctgctttttacccttgtctgaagagtatgcctaaggcaaaaataaaatgatttatattaattgtgttgacagtagaagtctcaaaaaaagcccaacagagactttgctacctggtttactcttatgaagaatattttaatgaaaaggagaaagcttgagaaaagaaaaatataaaatgtatggttcaagtaatagtggtacagcagcaagttagatggagctgaatactatgttaaaggagataacagagtggtatctttgggtcaagatcccatcgagctatgttaagtctgggcatatttgaacaagcctttaatcccaagagacagagtcaagaagatctctgagtccaaggccacattgtatagaaaaagtttcaaatagagaaaagcttaaatccaggtatggtggtacatacctttgatcccagcattcagaggacagagccatgcagatcttctgagttcaaggtcaacctacaaggcaagttgcaatacagccaatcttaggcaataaaggagaccactagaaaacagaaagtgattatgtaatataacaaagaggacatgttccaaccccagaaagcagcagaactcaacaactttggctatttggccctagctttatagtcaagaggagaaggagactactgtgacaattgatgctggttagttggggaagggggaaagtgataaggaatttccagagctggggactgggaaagaggataacatttgaaatgcaaataaagaaannnnnnnnnnnnnnnnnnnnnnnnnnnnnnnnnnnnnnnnnnnnnnnnnnnnnnaggaagaggagagatcagcattgcttaagtgaggtcctctgggaaatggtttttgaaagaataagaagctgtattccagagataggcaaggttgtagcttgtgctccaactgtacttggcaatgagtaagaatcacgaaggtggtatggaatcatgaggagcagctgaaacttgtcactatgagaggctgtagatggccattgatgaaggtgcagtctcagctgcagtggaagacctcaccattctggatataacactatcatgagatgaccatccaagtaagagtagcagcagcagtaagtgtggtcaaccagagcctagagtcctacagatggcagaactatagaagtgacccaggccctttgtaggagctcagaagatcatgtgtggctcccagacattggaacaagtagctgtaaagttgaagttgccttggataaacccagcatgttagagatgtcagaaccatgggatacctgctgaggaaagctgctaacaggaggtggaaccagccctaaaagtttgttgttgcagaattacagaactgccaacagcagtcaacaaggatgaaaggagttggaaatctgaagagtgctttgatatcagacatagagacatgcagttttcaagttgcccagctggttttctgtcttcctttggtacagtattttttgactttatactgggttgcacttaagagactacatgaatcctagaagagattttgaactttggacttttaacgttgttgagactggtataaattatgctgacttttgaagttgtatcaagtaattttttcattatgctatgactaaatatagccctcatgtgtttgaacaagcctatgggggccagaaagtggaaagtggtaatttgaatatgcttggcccagggcgtaatactattaagagattggccttgggcatgggctttaagaccatcctcctagctgcctagaagccagtcttctcctagtggctttcagatgaagatgtataactctcacctcctgtactcaccttgatgttagtgtactgaacctctgaacctgcaatgtagcccaattaaatcttttcatctctaagagttactttggtcatggtgtctatggacagctatggaaaccgtgactaagacagacggggaggaggaccttgaagtcattcttgcactacataataatttcaagacaaccacaagctaattagattctgtctcaaaaataagtgaataaataagtaaataaaatttaaaatatgaaatagcaaagcttggcaagcattagaaataaacagcatcctttagcaaatattgagttatgtgtgggcaagcatcaagatggatcataacctatgaatatttgttggacttccaataggtactatagttcacttagagttgtagaaacaaaatatagacaacagataaaattcttcattttacaaagtttatcacatcaaacaacttaaattcatatcctctaaatttttatttatgcataatataaatttgtaagagcatatgtatttgtatactcattaggaataatcatatatatgattatatgtgctacattgtatccttcaacttaacattaattgttttctttttttaataataagagactataaatttattttatatcctgaccatgctaaaaattccaccaacttcaactgttacttcataagaaatatttatgaatcagaacacagtgaaggactgcatatgacatacgaatttattactcttgtcattagccatgatcctttgcttctgttctgacatgttgggaaaatggattttttttcttctaaagtttgtcctagcatctgtttttatattattatggcagtttgatttaaattattaatatgcttctttcttctgttttcataagtgaaaattgtttatataaatggcaaaataaaattcatagaatttaatacatgtatcagaactaaaaaaactacaaaaattatacaaaggatttagccaacataattaaaatatgaacaaaattagagaatcatatttatcctttaagtcacaaaaatgtattacaacgtagctataaataattggatttaagttcttaggtcatactaaacataagtgcttatgttttttgaaactaataatcctcaatactatgatacctaacatgtctgtaaatagaaaaacattcttgcaaagattacattgccccaagaggggaaaaaagtatgttgcatcctaaaaggaatatttaaggcctgataaacaggcaacctgttttaatgttttctttatcatattaatgcttaataatattctttaaaacaaattcttattttttataaatgccaaacttgtatttccttggtggtattattttaattaaagcttatgtcataacaatgtaaatgcatatgagtaaaaaattataagttattgtaaggagtaggatttgcacctatagcaaaagcatatgttattctgggaaattaccttggttcatgtggtatttgatgggtgaaataaaaattcaagtgctgtgtcaagaaatagattttttttcatggactttgttaggagacatttatgatagtaagttgatcctcgacaagaggtttaacaaaatcagacctcagctgctgttatgacagaatttaacatccaagattcttacaataatttaagtggagttcattttggacaaggaatagagtacgcaaagccaaacctaatttttctaacaaattgaaagtcagcttcagttcttgtccaagtggctgttcaacatcccagaccaacagtctgtaaatgaaagcagaaattatttagatttggaaaaagtatctaaaattctgagtacttgagtcctgttcatagcgagcacaatctttttcatttgttcataaaatgtttgtttcctgatgacttgatttggtgaaatgattaattattttgtaaaaaaaaaaaaaaaaaaaaaaaaaaccacaaacacacataaacacaccaaaacaaacaaacaaaatttcaagataacaatatagtaaaagaaaacaagcaaaaacaccataattgttagtcattaagtttgaactatgctcaaattattgtgtaattgggggagactaatttatctctctaagacttgtacctagtcaattataaagaagttatgagaattgaatgcatctcaatagtcttaatgagaattgacgataacaataatgaagtatttgacatgtgttgttgttgtttaatatagttgtccatagcctatgactacattctttttgagagaataacaatatattcctattggttcttatcatgaatttctgaagcatttgttggcatctgatatatatgaagggatatatccaatctcattgagagcccatcatctacttatataataatacttaaaattttcttatacctgaaccaataaatgaaaagagaaaattgtaaaacagtcattgatgtttttaaaaattcatgttaataaaaatataatcatcctctaaaacatttattggttttgtgagaaactaagagcaagaattatgctaaattataaaatagttaaaacattttctttaaaatctaaagaggctgaccaggtaccaaaatatagagaatttgttaggaaacacataaccttttcaaaacataacatttaatctctaaaagtattattatttttagaagtagtatgaatgcatatttgagaattttgaaaataatacactaccaaccattgaaaataaatagaaattttgataagtagtagccatcttttatataaatataaaggctacttttccctcaaatgccattaatagtattaagtatcattttagttttaatattaatattttaaatgataaatatcaatcatttaaaaacggaaacataaatctaaaatatattttcagtaaacattaacaaaatttaacaaggtatatttgaaagtgatgaataaaaacatttattttaataaaaatataaactgagacaacagaaattagactatatatgcatatatatatatttataaatatgcatagatagatgatatattcatttctatatgagtatgtgagcactatgtaagttcttcccaagtcaatgattaattaactacaattccagtcactgtatgctttatatgaaagaataaatgtaaaataattccaagaaagattcaaaagttataattaacatctgttgtaaaatctgatgaaaaatccataaagtactcttcagcatagaaatacataattaaattagggtaacatagcatagaatgcagaaacatttttcttgatatttgagaaataaaaataaaatccaaccagtcctcaatcacagttgcttcacaaagtatgtccagggtcattgtcagtatttctcataggttaggcaatatttcctgctctatacacttagcttattgcaattaattctggtagtagaatataaagttaaaagggggtcacaagatcatctgctgcatttttcaaaaatatagaggcaatggtagtcaagaaaacttgttacagtttcttacttttaatactttcaggtttgaaaattaaagcctaaattagcagttagtttacagtttaatgctcctgattatttaaaatattaactgtgtaaatgagtttctgtttcaaaaataaacataagcaaaatctagtcattatattcttggtttgagtctacatatagataactgtcttagggttttatctctgtgaacaaactagaaaactggtttccaagtagctaggacaagagtattaaagcccacacccacagtgatataccaacaccaacaagcccacatttcctaatagtgccactctctgagccaagcatattcaagccatcacattctactccctggacccccataggcttgttcaaacacgtgagtctatgggggctacacctaaacatagcataatgaaaaatacatttagtactaggttggccttgaacacagagatcgacttggtgttgcctcctgggatttaaagctaacactaccatgtcttgacctaaacacagctgggtgggctcttgccccaagatcactactccattaattcaagttaatatccttgaacacaggattaactttcttatgtccctttaatatacaaactatgttttttaatattttacctttgaaagcttgctatgcctgtttaaaatgctcatcatgagacttaacctgagaacaaaatctatgatgggtgtctctgagatgacttctttttctttttctttttctttttcttcttcttcttcttcttcttcttnnnnnnnnnnnnnnnnnnnnttcttcttcttcttcttcttcttcttctccttcttcttcttcttcttctcctttcctttttttattggacattttcttcatttacatttcaaatgctatccccaaagacccctatactctccccctgccctgctccccaacccacctattcccacttcctggccctggcattcccctgtactggggcacatgatcttcgcaagaccaagggcctctcctcccattgatgactgactaggccatcctctgctacatatgcaactagagacacaactccggagagtactggttactctatattgttgttcctattatagggttgcaacccctttagttccttgggtactttctctagctccttcattaggggccctgtgagtatccacttctgtatttgccaggcactggcatagcctcacaagagagagctatatcagggtcctatcagcaaaacctttctggcatatgcaatagtgtctgggtttagtggttgtatatgggacttcttttgtcaatgcaattaatccaagtctccccaccttagcctcaggaagactcttcaaacaagggtaaaaagcagtcacataccaaaatatcacaaaaatagtctgtaggcaacatactgaaaatctccactaaaataccttaggccaggtctgcacagttcaaaccacactcagtaacaaagtcttccatattcctactaggatatcccattaagccctacttaaagtattgcactgttttccaaagtccccaaatccacattcctccaaacaaaagtactgtccagcctatctcagtttagttagctttttctgctgtaaacagacaccatgaccaaggcaactcttaaaaaggcaacatttgattgttggaggcttacagttttagaggggcagtccactatactcaagatgagagcatgacatcatccaggcaggcatggtacaggagctgagagtcgtacatcttcatctgagagtctctaggagaagactggcttccaggcagctaggacaagggtcttaaagcccacgcccactgtggctaacctattccttattccacaggccaagcatattcaagctttcaaaataccactcctctcatagaaagccccaggctgctacagtcatcttcacacccatttcactcttgtcaatatcctttctgtagccatgacctatgttcctagcatctccatcatgtcagttacattcacactgccacacttcattgttagcctgccatcatttgcgattttatacccgtgtttttgttttgataccactttgtcttctgagctctagacactatagtgttgacaaattgatcgttcatagaaagacatgatggtatcaattcactgcccagactcatcttcttttgtgcacatcatgacctccagtttgacattcaaccttctaaacctgtactcgcttctctcaacgtgcacttgctcagcttcaggtgactcaggcatttggcatctaggtattatctggatagaaagatttagggagtatattttctagtgaatttgtccatcttctgcacccttcaggtgtgtgtgtgtgttttttttttttccttaaggtctcattcttctccctagactaataccgaaaggcatactttgtcttgaatttctcagtggtttgcccattgcatattacacagtaatagacaagcaactatatacgtgtaactgggaatacatgtgggttctaaatagcacacacattgactcttcactcatatctgctcttaccaaaaaactttacttagatctaaatacaaacattcttctatttgttccacttttcataaacataggattgtatctcccttcatgttatgaattaaaaaggaatattggaaatagatatgtctattaacaattcacctagtacatgtagccaaagatagctctgaatatagccctatacaaaatcaaggacatacttgaagcataagttttttgtttcttcaaaacatgtggcaaaagttttgacatagctgataattatctgaaaaatacctagatttagaatattaaaggtgcagtgttatatcttcaaatcacaatttgaaattacttaaagtagaacactgaagaatttataatttagaatactgtttggtaaagattagtaactcctcacatctccagttctttaaatggaatatgtttttcaactagtttttattcattttttttcttggcaataaaagccatgtaggtttttgttcagtaccttattacaataatagctaaaatttctaatacaaattatgtgtgtgctatggttagtattttcataaatgtcttctcatttaacattttacacattgtatgcagtgatagttattcaagaaattcaatactacttatctcaatatttctacttttcaacaatcatcctgagtgaggcaatgcattccagagaaacaaaggccaattttctacatttatggctgctaaatttgcatcttcagatgtgtgtttcttatttcaaatacccatattgcttaggaaattagcctgactatgatggatcaacatgaagacattttgaacacattgctgttgggactgggagccgaaggaacttaacgttccccaaatctcacaaaactgggtaacactgagtgaattttgtggtatataacttttaaaagatattaatgcatcaaaactgggaaaatgataggtattaagcattaaaaaaatctctgtgatagaattcaaaagtaagcaaataaattatactcaaatttatggtggaactgtcctatgttactctgtaagaagaaatcctgccaaacggacttgagcacattagtatggattaatcatgctgaagaagacagagaatggatgtatcaatttgtaatttggtgtgtaggaatctaggttattgaggactataacaaattctaccaaaaatgaactgcaaaatgcagtacactgagtggagaacaagtgggaattttttccaagtatctcttcctgaccctatttggcagtgctatatagagcagacagtacacggcagatcatttttcattaaatagtgctgggagagacaaccctttccgattactaggaaagaggaaaaagcaccaataactatatttttatcttatttcatttctacatgattctctctcacctttaaaattcttatttgtagaggcagtttatatgaaattatggtgatgattatacacacacacacattgacagttgtgtttaacattttagaaaatgcagactcaatacccatatgtttgagtgttatgtgccaggaactgttctagatgctggagtttgagaatttataaaagtgaaagataaacatcaatggagggattatgttaaatggtaagtataaaaatataataaatcctataggaaaagtaatagggaaatgatctgtggaagtctagctaccctgacagttggttaagctggtacccagagaggtgtgtcctccagagctattaagcataccatggtcatggatattcgggtgacctttctggaagtgttggggctccttgtcaccctttattgcattaaaaagtgtcagtctttatgcatgcctgaaggttattccatcattacaaaaagaggactgtaaatgcaagctttttctctacagggatatttaatgggatttttatcaatcagataagttcctagtggccagaagtaagacatctatcatgactgtgttagaactagccattctaattaatagtatagggcctacttgccataataccaaggtcaaaaaattgaccacaattcagaaaagtaaattctgctttacctactcatttagtataaaacagagatgaaaaattctcctttattcttcataataagattttccccatacacatgagataattctcactgaatttacatgatactcagatttatcatgactcaaaactgtttctctgcatctcagtagatttttcctgcactgtttaaactagagacttcacaacagctgcccaaacacgtggttaacgccttttggtagtctctgttctttttgttcttagtgtcaaggttgcctcgaacttaataaagcaatccactgaaaatatcaactagaccacacttgtattctcgtcaggagacaccacttagcacatttctgcctcacttaatgtgaagtgttcactggatctctcgatccctttcattcttctttactcgtctcacttccaatttctctttacactagcagtgtgtgtgtgtgtgtgtgtgtgtgtgtgtgctctacacaagtaagtttcaatgcaatgttttccaaattttgttattctgataattcttaatagaaaaactgttaaaactcttcagaaaacacagaacaaaatgttttggagtcaatgaggtcttgttaaggatgccagaaattttaattgaattcttggatgatcaaagagggtgtaacaatcaattacagatgcagtgcatagtggcttgagcattgtttatactaccgctgaagtcgaagacaaagacaacagcccactactctgtcttttccacattttcatcgtcttaagtattgactaatttattggagactgagttcttcattagctatattattaattttgcttattcttaatctactgtgtagaagactatcagaaaatgttttaattggctcatagtaatgtctatatttctgggtaatcggatactttaacacatgtataaattagataatatttattcagagcaaatgtctagcttctcatgtaatttagagtagaaatattctccaatatataatcattttattatttattgcacagtgtgtatgcaataatgtttatgtttgtgtatgtatgtgcctgtgcatgcgcatatatgggtatttgtatagagcatgacacagctctggggataaaagaacaacttctgagtggcagtacattgctcgctttgttcccaccactttggataccaagatcaaggcattgggtattgcagcaaaggacaatcctaccggaaccatcttcctcacccatctcaattgtgaaaacagacacgatataaaacttgctgtagtcttacatgttttaaaagcctatatttaaacacttcaatctccctccttctagcccaccatacaaagttaatggagaaaagatatgtgctttatgaattataacagcagtaaagttgtagttatgaatatagcaactaattatagggttgggagtaaccataagaggaaaaactgtagaaatgggtcacagcattaggaatgttgagaactgctgaattaaacaataactctagtttctctcttttccatctgacaaatacagttctactacatggctctttaaatttgagtattcaaattcatataaatggaatggtttctgttccttggtggctatacaatttaacttattcacccatatttgcatgttcaaaattgctttcctcttaagatgaagagtggtttattgaacggatttgtcatattgtgtttacgcattcatccattgattgacacaggggttatttctactttgggtcaattgtcaacaaagtaaatattgcttctatgaatatgagtatgagaaatatatgcacaatcatattgagaagattagtttgtaatcatgtctattagtatttggggaactttccaatttgtagtgatactgctttgcattcttgctagctacctcacttggattttctatctaaccctccatgcctcaggtctctttagcttctttaaagaccacacacattccttagctggtctttgtagtgagtgttttcattgattcaaacatcacaaatttccaagactgtctcttcatgaacactctggttagattctaaaaggaaaggtcttttagtatcacttactgaactgttataaaataatttatcatgttctcctgatttctttttaaactctatttacctatttttttttgtaattctttcattgacacaatctctacctctagaattggcctattagagatgttatgtgtgactgacatgtaaaaattgctaattacctaacatcatccattattagaaacctatcatcattactcaaagacaacatgtgtattatagaaacaaatgaactaagagactctagaattacatgacttcattaagcattcctccagacttccttgtcatgatcataatgtaggtaaaacactttggcatcattaacttgaaaaattctgataacatgtgataccttcagttttttattatctctataattattctggtaatttcttttctttatatatacagtcacaatcctagggataattataaaacctttcaagtacatacaagcagtaagtttcaaaattggacaacaaacacattgtgctcctatcatgtactttttattgagaaattattgaattgataatttcatagttcattgtaataataaatgcttttctaatctatggggtaaaatgtatgaggaaaagttcagtctgaagaataaatgggaaattgtcacttctgtgttacactaaaaaaaaagagtagatgctggagagatggctcagaggttaagagcattggctgctctttcagaaatccttagttcactttgattcctagcaaccacattgtgcctcataacaatctgtaatgagacttggtatccacttccagcctccagtcagagagagagagagagagagagagagagagagagagggagagggagagagagagaatatgaattggctgttattattgacaatttactctcttaggtattatgattaggcaatataatatataatggatcacatttcttggttctaaatgtccattgatatatttcttttttctatacttatgatcttagctgattggttaaaaaaaaatccatgagatttagaaatggagaaatggtgtgcatccccttatacctacaatcctattttttcataatgatgaaatcatcttgaagagtgtatacaacactaaacgtatttcaattcaaggaaggataaggagaagccctaacaggtcctgaagggccagttgaacattgtcctgttttcctaaaattctggtaattatgctttcaagaatctaacttaaccaatacagggaaatcattctatgttttgcagaaaactgaagtaatagttatggttctagaatatttttattttctcttttattctaaaatatattatctattcaaaactattatcattcaaacaattgatttttttttcttttaaaacataaagatctcagggtgtggaataggtgatgctggagtcagtacagtgttcagtacatatgcatgagggcctgattatgactctcttgtactcacatagaaagatgcgcagggcagcctgagtcttggatggtagtggtggggatgaggatcactgaggcacacttgacagcctgtctagtgagttagtggctccaggattagttagagaccctttctcaaagaaaaatgaagctgtacttgaacaaattttatgtaagcatatggcttatatatgcagacacatccacacatgatgatatgcatggatgtgtacacatacacacaaacacatacacacacacaaacttaaatgcagaaattcttcatgatattcagtacttttttgagataaaattaagaagcatattttcatattttaacagttattttaaaacttaaatatgttaaatagatggattatgaaatacataacaattcaaggacactttcaagactataccaatggagttgcaaaatattaagccacccatttcatcctttttactacttagagaaatattttgcaaacattgtgtttcagtcataaaggtttatatccacattttgaggtataatttttatgatacttttgcgtattatataggagtcttctttatgcaagaaaaataatagcttgtccctgcttacacacaaaagaacatctttgggagaattgaattatatttagaaaattctgttgatataacaccttttatctcttttggaatgatttttatatggtagctactgtcataactttgaagagcattctttcaccataaacactacaaatgtcaagtagaatatgaataaaattagtatgtagggatatggttatcttttaatatcaaaacacaaaggaaagatacttgagtaatcagattatttaagattatttgatgagttaactttcaaaaatttcagacagagaaaaataaaggacactattgtttgaatgaggttcaaattgcctctatttttgagtaccttgttaatttacaggaactatgttgaagtatttcttggcctatcaggatggtcacttgtgtttctcatagagcttaactgattttatacaatatatatatatatgtgtgtgtgtgtgtgtgtgtgtgtgtgtatgtatatgtatatataaatgcatatatattttataaaaatatgtatcataatttattgcctatgcatagtcaatcaaaatgtctatcataagtaactataaatattttcttacatctacatttttctcgttatgttatacattacaagaatttgggttatgttaactatttctaccttgtccaatattctatcatagatatatggcccccttgtcatagctggctctgttgtcaacatgacacaggctagactctcagaagagaaaactacaattgagaaaaggcctccataaatattggatgccttcccgaggctcacatggactgggtttcacctagtaggcaagctggggctgaaaatagagggcaactaggtggagagaaaaatggagctaagtcaagatttctgatcaaagctcaaatgtttaaaagaaaactaggcttataaaggtggggaagcccatcannnnnnnnnnnnnnnnnnnnccccccccgctaatccattcttggagcctggaaccagctgcaggtgacaatgtgcaggatagggtgtagtctcctgaatagctcaggagtctctcagcaggtagcagtatcctgaaggggaacagcagcagaggctgaacaataatggagtcatctaggcaggaaggctccaccctaggtaatctccttagtggcagcaaggtcaaggtctggatcagcctgcttcaggctgggggggtggggggggggctacacataaagtctagtccataaggcttatggctgtagggcattttattgattaatgattgatgtgggggcatccatgctcattgcaggcattgccatccctgggcaagtggtcctaggatttacaagaaaccaaactgacaagtactaccagtaatgattattctttatgccctctaccttctgagtacactcaggatggagtgtaccatgagaattataatctaaaataaacccattcctgcacaagttgttttggtcatggtgtattttttcaatcttttatctatctatctatctatctatctatctatctatctatctatctatctatctatttaatactccagattttattcccctcccggtccaccctccaactgttctacatcccatacctccaccccaccccctgtctccacaagggtgtccctgtccctgcaccccaaccataccagacctctaaactgtctggggccttccatctcttgagtgttaggtgcatcttctctgactgaatccagaccgggtagtcctctgctgtatttgtatttggggtctcatatcagctggtgtatgcttatgctgcctggttggtggtccagtgtttgagagatctctgtgtcaaggttaattgggactgctggtcctctgacagggtcgccctcctcctcagcttcttccagcttccccctaattcaaccacaggggttagcagcttctgtccattggttaggtacaaatatctgcatctgtctctttcagatgcttgttgagtcttttggagggcagtcatgataggtcactttttgtgagtactccatagcatccgtaatagtatcacgtcttgggacctccccatgtgctggatcccacgttgagcctgttgctggatattgttttcctcaggctccatttccatccctacagttttttcagacaggaacaattatggatcacagttaggactatgggatgccactcccctctctcacttgatgccctgtctgatgtttcatcatagcaaaaaaaaaaaaaaaaaaaaaatcctaaatactaaaaacaaagcaaagcaaaaaaaaaaaataaaaaaataaaaggacttatattccaaacatgtgagattctgtataaatatctataataattgaacaagtatcaatgtcttttagggatgcatatagttatatttcaaagtgataatgtaacatcatcatgttacaacatcaaaaagaaacaatcatgtcaatttggtagtaattttcattattgctgtatactttctctttaaaaaaaagttagaggattttagacattcactaatatccaatagcatttgaaagcttaggtactactcataataagaatttttatgcattatctctcattaagccttttcaaaatcctatgaaattgttctcaactttatcttcattatacatctgagggaatagaggcttacaagtaaggttttacaatcttatagctagaatctagtgtagaatagaatcttagctatttcttagcttgaattcagcactatctagcatgtcaatttaactaggtatatgaatctagtgaatgatagaacatggtgtgaaagcaaatttcccaacacctgagcttagatgtcttcaacccagagtgctatctactttcctttaataatatattttaacagagtcagcaaataatagaccaagtttgttttgagtcatgctgagcaggtcacaaccctatcttgttcaccttaacaatccctttcattaaaatactttaattttatttttttaatattgaagattggaaatatgctcatttgtgtggaagttcgttgagacaagaagaaaatgtctggatttcaggggactgacacccctaatattggtctcctttacaggagcagtacaagttctcaatagctgaacaatctatccaacctattctaaagatttctgaaaacagaactggcacagatatttctaatttttacttaaattgaataagtcattcttggacaagacggttttttcatattctctaattttcagttatttnnnnnnnnnnnnnnnnnnnnnnnnnnnnnnnnnnnnnnnnnnnnnnnnnnnnnnnnnnnnnnnnnnnnnnnnnnnnnnnnnnnnnnnnnnnnnnnnnnnnnnnnnnnnnnnnnnnnnnnngatggtttgaccagtagtatgctgttaggcaagcatgaactcctgtgtttggattcccagaatgaatgaaaaattgggtcctcgggtacactttgtaaagggagcaaggcagatatccagagctctctgcacagccaggctaatcagtgaagagcaagcacagtgagaaagtttttcatataaaagatggtagaagtctataaaggaagacaccaaataactacccctagtagtatccacgtataggtaaacacacacacacacacacacacacacacacacacacacacacacacactcctgtaacaaacatggaaagtgtggtaggtgctaggaaagaagtactctggttaacaaatgatccataaatttcatctgtgtgcaatatttgctattttgttaactctgaaatgacgcttgctgatgagatctgtcttttaatcctagagtctcaagtccctgaccagccgagttctcttcacgtgaggccccagacaaactgtatcatcatgagttggacacctcctctcaacccaaacatcgtggtgagaggctatattattggctatggtgttggcagtccttatgctgaaacagtgcgtgtggacagtaagcagcggtactattccatcgagagactaggtgagtagcttttgtttattttactaccagaagaagatggaatattatcgttattttatttcttatcaacatggcttcatagattatggtttcagcaggtaccatgaattagttaagtcactttacacacacacacacacacacacacacacacacatacaaggtcatatacaaatgtacacactctgtccctcctccctcaattcattgtgggcactctgctctagagtgctctctgatgaaaagattcattctatgagcctttcgttatatgcatagggcttacaaactgcattgaataacttttcttttcctgaccatccttgaaattctctaatcttcataattcttataaaaaaagattatatatatatatataaaagtggctgcttggcccctcctctcttcatttaagctctcaccttttttttcttttatatttatttatttattttatttatttatattattaggtatttatttcatttacatttccaatggtatcccaaaagtcccccacacccttccacacccactcccccacccacccactcccacctcttggccctggcattcccctgtactgaggcatataaggtctgcaagaccaatgggcctctccacttatggccgaccaggccatcttctgatacatatgcagctagagacatgagctctcaggggttactggttagttcatattgttgttccacctatagggttgcagatccccccagctccctgggtacttcctccagcccaatcaattgggggccctgtgatccagagcacatcatcctgagtgaggtaactcaatcacaaaagaactcacatggtatgtactcactgataagtggatattagcccagaaacttagaatacccaagatataagatacaatttgcgaaacacataaagctcgggaagaacaaagaccaaggcatggatactttgccccttcttggaattgggagcaaggcacccatggagggagttagagagacagagtttggagctgagacaaaaggatgaaccatctagagactgccatacccgggggatccatcccataatcagcctccaaacgctgacaccattgcatacactagcaagattttgctgaaaggaccctgatatagctgtctcttgtgagactatgctggggcctagcaaacacataagtggatgctcacagtcagctattggatggagcacagggcccccaatggaggagctggaggaagtacccagggagctggggggatctgcaaccctataagataatatattttaaaacttcatggtacctttgattgagacttctggtttttggttttttttgtttgtttgttttttaatcttagttgtccaatcatggtggcttgtttgccttcaacatctgtagaaaaagctttgtggctatgctattttgattgtaacatgtgatgaaaagaagaattttcaatcaaggccataaatctcttctgtgtgtgttttttttccttcataatccaaatctcttgttagagatgactttgttttttgcatgaaaccaactcttctgcttcgtctctgtataaagtcagctatgtatataaaccttcagttcattttatgctgattttctatggtgtgctaagggtttgtatcattagcagagggaaatgataaataatatatcaggatgccactaagttaagtaattgtcacaaagtaaaagataagttcattctacctgttgatttaaagccgagttactggcagtgaaatgctttgacctctttggaaacggaacttgattaggggtgggaagctctagtcatttgcagtgtccctcacaaacagaacatttgtgatgagaagcctcatttgaatctgaatagctaaaatgcagtagtaagaatagattctatcaatgcagaaataaaattgcaccaatccattttctctgtaattgctccaaacactaatgagagaatcacctactgaaactggccacaattagagttagcttggcatttaaaataatattcccccagtcagtttcagggtataaatataagggcaatcacaaagctcatattttatggccgtcaaacctgtgtcaggggactctcagttatccattattcagaatacaccatctctgacagtgcatctttattccactaaccagacaaggcaggttagcatgcacgagctactgacagtaagaataaatgcattgcaaaacaagcaaagctggaaagaaaaactacatgattgcactgtgtcctttcataatgattttcttcattacaaagaaatgagaaaaatagtggaggtttacctcattgtgaaattcacattggtgctttccctaaatgttaatccagatgaagaacatcttttaagatgtgttcaaaagaacaaagagaaaggctgaggtgtatctcagtcgcaaaaccatgactagaaagaagaagagagtaagtgtgagttcaactttactcatgaatttgtattttacagcttatttggatagagaattcatatgtctaaacacacatacacaaaggcacacacaaagcaacaaacacaaacatatatgcatacatacagagacgctcagaggcacacatatacatacaaacagatacacacacatatatgtgctcctatgctactacagggcatacttttaagaaaatcttaaaatgcatatgttgacataaacatcaaatgaaagcacacgttgttggttttcattagggtgtgtagagttatataaatagaggtgtgtggatcaacttgtaatttttgcaaagatcacagtttcatgtctgtccacagactctgagatgaaatcactaattgcttcttttatgacgttaagcactaaaataaatgttatgtccctataacaaaatacctcagccaaccatattgggttgattacattttcaagggtttgatcacattactgtgtagaggaatatcaggggagcagcttcatcacagaagcaggaagcaaatatctgctccactgtgtctccctgtctctttcattctacgtggctcgccattgatggaacatttctgcctacagttaggctttgtcttctttatcttgtctagaaataccctcctagacacagtagaggtatgcttcaccaatatcctaagtatctctcaattcagatagatacacaagttatatcaacattaatcattaacaattatcatggaattgcttaaggaaatacacttatataaatatttatagtattaaaaccataaaattgtctaacatctatttttcttgtgataagatgccattttatattttcttttattgaaaatagattttgttcatagggcatattctgtatacaatttccttaccatattctgtttaaagaaaggaaaattttaagtactgcataacagttacataattaacattaagaaaattcttaaaaaattttgcataatgttagtcacaacctcaagcactgattttgtgtttgagactacatgacaattgcttgctttatgattgacagatgaacctcctattctcttagaagagaaccaaaaattatgaacagcatttcgcttatgctcaataattattcagtatttatataaagatatgtataacctacctagggactggaaatataatatcatttgaaaaatatttactgttacctgatcaaaatgattaacatgccttgaataagtgaacagtctcattaacaatttttccaccagatatttatagttaacccagtgacattttactttgttgaataaggagctgtagtgccaggtgtaatatacattcataatgagatctgcatgatttgaatttaattacattagacttacatattttgtaaagaactatataccgattgatatatctatttatcattccttatatgtatatattacttactggtatataataagctatatatttaaagtatttatttctgaatttaaagaatcaactgatacataatgtatgatctttctttcacatctcttcccttattttttaaatattagaaagttagtaaatgcttttattagacttattcctgtcaaatgcgttttggaaaatgttttaagtgggattgtgtatcaaatttattttgaatgtttagtgtgaaagcataaatttcataacattaactgtatatcttatacctgtttaattcacctattctgtcaactctgtagatgctatggaatttcccacttaagcaaaagaaaaccacaaggaaacacttagccttatagattctgaggcctcctgcgttattgaaatactcagtaaaagcagcgaagtgcgaatcaaagtgccagatgcaagcatttttggctaatttctcatcttggggaaagtttcagtatttgccatgaaattggtcctggattcttaaatatgtcatttatctggcatgtaggaaaggctacacatttctgagctttcaggcaattttagaatcacatttttagaatgcttttaaaataggttttccatcttaaaattacatatttttatttctagtatgactaattaaattcatttttgaagggaatctaaatctgaatttctcctatgaagttatgtatagttattatccctttattgtatggttgcttttgattcgtttttatttatttaattttttgtttcatatttgatggttgtactagccaacaatgctcttgtattctctctctatttttaatttgttaatatttactggcctcagagtgagttttttcaaacttattctaatttgtattgtatttcattgttccttggtttatttagcgtttcatagtttggagtttctctgtttttttattatttatacttttatctttgcatatataaaacatattcttttataacaaccttttaaaattattgagatttattttgtagattaacacaatgtatattttttagttaacatacatttaaatacaatatatattatatagattttaaactttatatacatgccaatttgaacttaaaggcacattctgagcatgatttttagatcttaaatatattaccaaattttctgataaatatctctctggatatctgagtagtcatcaaaattatcttgggaagttgttaaatcaataaagttacaacttttatgactaaagaccaaattatatctgtatcctaaatgtgtgtttgcaattaatccccatattccattttcttaatatttattactattctatttattaataattagtcactacaagcagaagagtattactcaaataatagccaaatattcatatcttttaaatatcagatgaaactttcatatcacaaatgattaatagagaggtacagaaaatgatatttttaaaattttacattatactaagctagacagttacatatttaaaacttccaaatttcaattcacatctctcacttttttttgtttgtttgtttgttgttgttgttggttttctttgttttttttctggctttttaaaaattaaatattttcttcctttacatttcaaatgctatcttaaagggatttaattatgtatctgatatatgttcttctcaattattgtcctcatctttcctattatcacttcaatgatgtactgctaatgtaaatagtatcaatatttttgaatactcataaatattttagtttttaccatttaattgaatatttaagatgtttcacatagcccaggaccattacatttaggtctatttctaatgggtattccatgaaacagggttattgtttttttttctcccataccatatataattttttgttttgtttttgtttttgtttttgtaagacagtgtttctctgtatagccctggctgtcctggaactcactctgtagaccaggcttgcctcgaactcagaaatacgcctgcctctgcctcctgagtgctgggattaaaggcatgtgccacaatgcccggcatatttttttctgtaatcagtttcccaattgtctcttcgagaaagaacagcatgcatatcttacaatctatttatgtacatgagttgagataataaccttggagccgtatcaactttaattaaaatatgtgtgtatgataaagttataattttgtgtattgtagatttgtagtagactaatgatttttttaaatagataagtttaagtgatttttatctcagatatagaaaatacataatattattaagttccttgattactggaagtaattgccatgaataaaatacaacagttcatgtaaaagactaaaatataaactcactatcttaaacataatcacatattgattataatatcctgggtaagagaactccacttgttttccaagagcaccatttacctaaggagaaatgacaagggataagaaaatgtcaggccataagatctcatttctctgactacaacaagaagaagggctattatcttctttttttttttttccaggttagtttcttctaaacatataggcgtttccaggcagtcttgaaggacagctgtacagtgattcattaataatgcattcactctatttgtaactcctttcttactctctactctctgaggtccaaaagaggtgcatcatcttatacctggtgaattttttaaagttatttggaaaaatacattacaaatgatgaatactattattgaacaagaggaaaaaagatcattgcatatgagtaaaatatctatatctatctatatctatatctatatctatatctatatctatatctatatctatatctatatctatatctatatctatatctatatctatatctatatctatctatctatctatctatctatctatctatctatcttaatgtactttctctattcttcacacaaaggaataagtgattatttctctcctccaatcaggaccctataaaatactcggtggttcattcttcttacaagtttaggatcaagcattcaaacaagaaaaatgtttctcacatcttctgaagatttatagaaaatgtcttatttgggttaaaactattctgatcccattctcaatctgccttactcttcagtgtttacagacagcaagctgttcagtgtatttttttgccaaagtctgtgaaactatcaacaatttatttcttcattttccccagtggcaggtatcaccctggttctcaaaatgaaggaaaggaaagatgcaattaaataaggaaactcaaagttattcttaatttaaatatataatatatataacaaaatatacatttaaattaaacttaatatacataatatataaacatactatcatatatttatgactactgtttatgattattaatatttattcataaataaaattatagtcagtatttatcagtatactagatggaaattataataaagacttggcttctagtgtagagagacataaatggtcaaatacagccagattgtgtcaagaggcacttcccacatgaaaaatcagatgtttctgggaaattaaaacctgccagtttaccaaaaaataaaatataatatagtgacataagatgttagtcctaaacattcttattaagtagcataaaccatagattttattgtaatttatttttggatgagtgctcgagcttaaacataaagaaatagtattttatcctatggggtatgcatagagataactatggggaacataaaacaaaaagcaaagtaaaagactcgggcattttgctttattaagcagttatactagtaaattcaagcattttttcaagcatttttccctttcagttctatcaagttctagtccatgtattttgaaactatgaaagcctcagatgcttaattgtttaggattatagtttctttctgttgaattacccaattttccatatctaaaccatcctacattatcattaaaatgataatatccttattctaaaatgtattttgacattaatactactactaacaataaatatgattgtatgtcagtgttgacataatgctcctaccacataatctttttctgttttcctaccttataaatacgtgtattttaatacatagaggattccttattggtaagaaataaagaatattagcctgttactttctaaactaacctagacccaaggaaaaaacggcattcaatcattaatgtatctttatacataacgtgtgggatttttttttttagcttagaagatttttctcacttttattgattgtgtatgtaatctaggtgtacaatatgcatgcaaaggggtttggttaaatgtgggggaaattatcaacattatcaattttcctcaaatagtattttttccctgtttcaagttatttcttgggttttgtgaatattacagtgctctcaggttcactattcaccttctatctgtctgctttttggttttagtgtgttgatatctgtgttatctggggcagttttcctattgcgtttaaagccagagagagtttatgttgtttcattactttatggactgggtatcctacctaaccttgtcagtgttcaacatactgtacattgcatctgcaaagggcatttttgttctttacatttccacaagtgtcatattttcattaaaacgctggatcttgagcattcttcaatgtgtggagtatactttatgcttttagtgttcttcccaaattattttttctgtactttttcaaaatctctttttattcactcatcctcatgatggattacttttgttaaggcttgccaattgtgtgagattcctaatcatgagtgtgtgtgtaggtgggcagtgttggatgtttgagattttgatattgattttaatatccttaaatttggctctaggatgcaactacttggaaaaacaagcccatctattccttaccttagtgtcttgaatggttagtgtctaatctcatgaagctaaatccctatgacttcttgattcacatcaggttatggagacccctgtgccttagattctgagaagactaagaatttcacttctattcctgttgtgtggtttatgtcctagccttgtgaagctccctcacatagtggctgaaaacaattcaaatgaggtccaaaggtagagcccaaagaaccctgcagtacacttcccatctttgtgctttcccacacccctggctgctctgtggctagactctgttcagcaaaatgtctatgtactttctggtttctttcccatttgttgcattctggaaactccaggacgaagatggggaattaaaatgctcatgtgatttcttctctctcagaagtcatagacctgaatggctcagtagccagtgtcacaaaactgttaaatatatacttattttaaactaaatttaagagtaaatccagtctctataagttcatctcattagaaatgggatcctttaaataatggtgaaatcagcttttatcatatcagcataccaaacttcagcttttcaaaaacaccggaggccaagtatattatacttatctcttggtatctgccattaatctcatcaagaatgaatcctgtcatattgcatttttcaggggtaaatttaacttgaatgcttttagaaacgggtcttttagcctgtggagaaatgaacctttataactcccagagtgaatctgaaactcagtgagttcagtataaattacatgttagctctgcatgctcccatcaaaagtatctcttcatgcatataatataaaagttttgagtttatgacatgcaaacattttaaataagaaaaaaaatcaattcactttggtagcatcaagaagagtcaacatacatgaataaaaatgaatgagcagcaccatggggtggacatgttattattttgaaatgtagtgcactataggtgttgcttaacaaagttctacttggtatttttggaaaagaattataggaataattatggaaaatgttttttttttttttttacctgaagtaaaaaatcgagactctggaggctcaataaaaataagtcatttcatggtagagaaagcaagaaggagaggattccgtacttatctatccttaaatttcatattcaaaatggattttcagttatgcaatagaaagtgctgttgtagattgtgagatcagtgcagaccactggaaaggcatatacggaagctgtggcaaacagattcgaaggaaggcaactcatggttattatgatcttataacttttgtttacacaggaaatcactgcaaattttcacatcaatatcagtaatttatttgcttcttttttgtattcttattatgcctccctgacattaagacatatgcccaatttttacattctttgtggaagaggaatacagaatctaatttcttatttattatattttattatattatattatgttatatattatattatattatattatattatattatattatattatattatatacagtgctattttcttaaaaattcaaaggccctgtcaagctcaacttagtgtattccaattctcttaccttttattttttttggtttttcaaggcagggtttctctatgtactttggctgtcctagaactcactctgtagaccaggctagcctcgaactcagaaatcagcctgcctctgcctcctaagtgctgggattaaaggcgtgtgccaccaccgcccggctctcttatcttaaaaaatgtgaataaaatcaataaagaaagcacattattatttgatttagtttcattttaagatttattttgtccatttggtaacaattaatcaaacactaactgggtcagtttcttcacttgcagactagcgcttaattgggaggaagttgcgtgctaaaagataaatgtttatcatattttgccaaactgattatataaaattatgtactgaatgacattaagaataagcaccatacagaggacagggacaaatattaaggaatgtaacatgctgctctcttgaatagtccaggcttccaaatacatctctcttaaatagaaaaaaaagatacatcttttgcaaagagtaaaagaaacaccacactttgtaaattttctgctttgtgcatttgtaatttgaaatgtgactttgatatgagattggtagaagaattttattcatgatgaaagcagtaaagtttttactaaaagtctgggtcaaattcatccccctggtaaaacataaaaaaagatgtctaggactgtgccgtcaaggagaaacaggggaagcccaaggtctagtgaataaaccagttgatccttgaatacaagttcttaaaaagaaattttaagaactagttaaagaaggttgaaaattgtaacccttgagaagtttgaaatattttttattccttagttactctagatctcatagtatgtatttaataattacctttgtgttgtaatgattaaggaaaatatattagtgaggaggacttccatagaaactttgcctattatttttatgaaacatgactttgccttaaagccaaatctgggctacaccagcctattaagtgctgggattgaagacatgctgaactgtgtctaactattttcaaatatatttttgtattttatttaaatatttaaatatataaatctttaaaaacaatgtaatctggggtcagaagttcagctctaccacaccataatggtcattattaaatgggatagctctttagttaaaaaaaaaaaacttattttatttaaagcattattacataatttctccctccatcttctaactctaaccttcccctttctccctgttctctctcagatttatggggttgctgtgaatctgagaaagagagagagagagagagagagagagagagagagagagagagagagagagagagagagaaaggttttccaagtaagtttactgttgcttgtatattttaggattgacaactttgtattggataatccaattaatatggggcacacttatccctgaagaaagcaaattcttccttttggcagtcattaattcttgcaattccatgaagtttccttatcttctttggtattccaactgctgttgtcatttttcaggtcttgtttgacatgcatagtgttgagaattcatgggtgtagctttcctgccatatttagaagacctgattttgcaaaagtctttctggtcctgttgtactttctactccttcttatgggacattccctcaaccttagttataggttatcttacttaaggttttactgctgtcaacagataccatgacaaaggcaagtcttataaaggacaacatttaattggggctggcttaaaggttcagagcttcagtacattatcaacaagctggtagcatggaaacatctaggcaggcatggttcaggcagagctgagggttttacattgtcatctgaaggctgctagtagaagactgacttctaggcagctaggatcaaagtattaaagcccatacccacagtgacacacctactccaacaaagccatacttcctaacatagccactctctggcccaagcgtatacagcccatcacatagagatttgggttgtagatgtgtcacttaagtctgggtacctaacaggggtgttctcaacagtatgacctgttgttcattttcgtaatggtctctgtatgctgtagaaagaagctttaatgaggttttagtactacacatatatgtggtgataaatctataccacattgagaattggttatggaaattgagaatagaatgttctatggtgtgttccatagcctgaataatcagggtgattggttaagtttacagtaccagataaaacttctctgatatatcagaggctgtaagttatctgtgaagatgcagaggccattattgaactgttagggacctcttgctgtgctggtattagtacccaggcatcactgatgaggaagactattgcttgtgttctttccttggaagctgcatagcacctttcaatactatgaaagcgagtcctcggcaaggaggattgggagtaaggacccagctcttctttatagagtcctatatcaaaagtttgtgggtcttcagcaatagagaattacctccaacttccaggaggcaatgaaaaacaacatcaatagtctatattggttcgggggagtttaatgagagaatcattgctagaatattggcattgttttcaaagcactgtgagtgcattactttgcttccccttgacatgataaagaccataaccaaaaacaagtctgtgtttaagcattttgtttggcttacgtgccctgatcacagtccactgagggcagctaaggaaggaacacaagatagacacaccttgatataggaactaatgcagagacaagtgagtggaggaactgccttaatccctatgtcttactcaatacgatttcttatacaacccattaacagctctgaacacggtgacctgggcctttctacatcaatcattaatcaagaaaatgacacagatttatttgtcggcaattctgatggattttttttctcccagttgtgattcccttttctcaaaggacatgagcttttggtaatttgcaaaaacaaacaaacaaacaaataaacaaaccaaaatcttaactgacataatgaatcatttctgtcatttgccatttctcctcttcgtggtgtctgttctgaagtctgagtcatggaaattaaaactatcatgcgattatttaattaaccgtagttaccactgtgaagaattatgccctacagtgtattcattttatttaaattacttattataattctagaatttttcaaaggaaagacttatgcccctttaaaaactcgcccttttaaacttctgattgcatatattttggagagttctacttgaatgcatgcttttctggccccagatttgttcaatttgttttcttcaatgcacaatttcctttatctctgtcacctacatggtatgaatccttctatgttcttaagactatttatgcccacatgtttaattatttgaatggtgctttatatgggaacataattcatgtaagtgagctttgtgtaaagaatttttaaacatttaagtaaaggagatagtacattcttttggattatttatttatctaacaacttttgtttctgagatgtgaatgctttatgggtatgcttgaattatcaatattttactatacaaatgtacaaatgtaaaacacaatgcacatacaagttataagggtgacaattaaagacaataatagaatagaacctattactcagtatttctatcactgttaatcttggaacataatagttattgaattacatagaacagttttatgaatcattcatatgttttataagattataagatatttgaggtcattgtttatcagaaatattaacagtattcagaagtacagtatgtttcttacaattctatccaccttatctagatatttttccttaatccatctatttgactatcttgttggaataaagttgcaaacacctagttcagaaacatcagcttacaccttgccttagtttgttttcccatagccaaaataaagtactctgacaacagagactaaaggtagaaggatttaagtacatttagtttataggtacatttcatcttcccagagaagtcaagacaataagagctttagtaacaatcacgattcattttgtagatagctgattttgtgttttctgcaccattgcacatttgtgtatagatcaggaagtaaaaacagctataaatcagatgtgcaaattattattaattaatatgccactcctttcttctggagacattaatgttgtgtgccagtgatgtagactgatacttacaagttgtaatcttaggatggaaaagattgaactgtttatatattctttggcataaatcaatttcttaataagtagtaaggaagtgacagtttaaaaaccagtaatattttttgtgtgtggtgttgactcttgtgtatgataggaaatttttctgccacaggtttatacctacaaccccaaatgtttaatgtctaatgtaaatttccttagaggaaagaacttagtgaagatacatctctgaacttttaaaccctgtaaatgtgacctctttctgaaaaagagtcctcactaatggatttatgtaaaggatgtttagcaggatcacaccagattatccagtgagttataaattgcatgatagtgtccatcatgaagacacacattggcaagacaacatcagaacaatgaagtgaacaccaaggggaagcacccaatggcaaggcagcagaagaaatgaggtgaagaccaataggagactggagtgatgtagtgaccaagaacactgaacccactaaaacccaaacagagcgaggaggagttctgtcccggagcctgtggctcagttagtgactgcttgtaaatctcagatcctataaatgtcaagagaacaatctctattgtttccatggtatagttgtaactttcaatattacattaattttccactcaatatcctaaacttttaaggctgaatttctgagtcaagtatatcctacttcctaaagcaaaatgaatatagttataaaattgacaggttcaaaaagaaggcacaataccatagtaggacatcctggttgtatcaaggcagggtggtgtctaggtgatgagattgcaggagctagccgataaggcattccaaagacaagttaccttagccatctagaattctgttccacttggtcaacttcagcttttcagttaaatcccagaagattcatgccaggaaatgaatacaaaatttatactggccttgttttagtgttgggaaggtttttttttttgtttctaacaagaaaaaaaaaataggaaaaaaccaaacaaccaaacttcttgaacgaaacacattggttgccatacagagacagttgccctgaggataaggctcaattagagcagagtaaacaaaattttgtagaaatatagaaagccaaggattttaccctgaagaggaaagagggtttatccacatgataatatattgacaaggtttgcatagcaattagcagtgtcttagccgaaattaataaatactctaatagtataaagcagaattatagtatgaaaaggagagttttcagatttggaacagaaacaacaatttttattctacaattgaccatacctctttgtacattgttgtccttttcatttatttattagatgttttcttcatttacatttcaaatgttatcccctttcctagtttcctctctgaaaatcccctatactctctcccctccacctgctcccaacccacccactcccaattccaggccatggcatttccctatactggaacctacaatctttgcaagagcaaggggcctcttctcccactgatggctgacaaggcaaacttctgctgtatatgcagctagagacacgacctctaggggtactggttagttcatattgttgtttctcctatagggctgcagaccccttcaactccatgaacacttcattatgtaacttctaatttcttcaattattttgattatggaaataatcttttatttttctaattaataataaatctacataaataaaagatgtaacatatgtatccttggtagatcagacacatataattttttttaaaaaaatggtaaagaggtaacaggcatttgtaattttgacaaataatgtagaagaggtattttttcttttggtatattcttgcttgtctgagatgtagaaggaggccttcatgatttggggagagcccatgacaaaggttttcttcctattactcaagtttctttagcttctttggtgtgtcactagaacactaccagcacatctatgctgacaaggaggagtgtgaaggaagaacacagactttgtaagacaggtacattttataaggaatgtcatgaaatttaaagaagctaatctgctttttaaatttattttttttcaagaaataaattttaatcatattctttgccctccctcaatgtcttccacaccctcccaaccttaaatttttcttcctcttctcgctttcttcatttgctctttctcttccttctgaagaaaaaaaatgcttttattttttattttatttgatttttatatttttccaatttttattaggtattaaacttcattaacatttataatgctatccctaaagtcccctatacccccctgattccctacccaccctctcccacttcttagccaggtgtttcccctgtactggggcatataaagtttgcaagaccaaggggcctctcttcccaaatatggctgactaaatccagcacccattcatgataaatgtcttggaaagatcaggaattcaaggcccatacctaatcataataaaagcaatatacaacaaaccagtagccaacatcaaagtaaatggagagaagctggaagcaatcccactaaaatcagggactagacaaggctgcccactttctccctacctattcaatatagtacttgaagtcctagccagagcaattagacaacaaaaggaggtcaaggggatacaaattggaaaggaaggagtcaaaatatcactatttgcagatgatataatagtatatataagtgaccctaaaaattccaccagagaactcctaaacctgataaatagtttcagtgcagtagctggatattaaattaattccaacaaatcaaaggcctttctctacacaaaggataagcaggctgagaaagaaattagggaaataacacccttcacaatagtcataaagaatataaaataccttggtgtgactctaactaaggaagtgacatatctgtatgataagaacttcaagtctctgaagaaagaaatcaaagaagatctcagaagatggaaagatctctcatgctcatggattggcaggatcaatagagtgacaatgtgagtagacttttagttttgtgattcataacgtaatttttaagatttgaggaggtagtaaaagaaatcataccatgtattagattttttaaatgtaattttgataaaacatcatgatcaatgaagcaatttataaaagaagacattgaatttgggggtcatgatgtcagagggttagagaatccatggaaaccagagcagcagacagacaggcaggtatgtggcggcagcagcatcataatccgcaaagcacagcatgaagcagagagaaccaaaactaactaagaattccctggccttttgaaacatcaaagtccaaccccagtgacacatctccaaggctgtacttcctaatccttcacaaacagttctaccaacagggaaccgactattcaaatatacgatccaatgaagggctttctcattcaagccacctcacattgtatgttgatgatgtttaatgaaacaagaaaataatgttgttttcactgctgggcattacatatcaggtaacagtaggcagaaggtttagatggcctataactgtggcagtaaatatttattgcatacttactatatgccaaactctattagatagatgataggtaggtaggtaggtaggtagatagatagatagatagatagatagatagatagatagatagatagatgatagatatagagttttacttcacactcaatactacagctattctcacattgataccattttgtggatatcataacagcaataacagaaatttaaactggagctaaaatgtcttgagtgacttgcatcatgttttaatgtgaatatggtagacccagaatcaatctgtaggagtcaaaagcactttgatcagtgtcaacactacacaagtctgtataccttcttgcgtcctgactaattaacatgtactacagttctaatacttagttaacgaacccagtcttcttgaaattctactcatttgttaacattcagtcatttcttaattggcatttagtaactgcaaaattcattcacaattcattttatctctacaactatgaaagttcaaagttagagtaagtatagtatttcaagccagaaagttttaactcttctctggaaggtttgtgacaatacaagctgatatattcatgtagttattatctggataaacagagacacaatgtactgtctctccttccctttttctcttactccccctttcactcccacctataaacaacataggcacattcccgatggcaccctttgaaactcttttttatatttctttaccctgccctgcatctgtgattttcctttgtctttagctcaacttaaactcactagaattaaccctaagataaagaatttggcgatttgtattcaattttaagagtacatagaatcaagaaggaataagctgtatgaaaacctacagcaaatagaatttattttctttaaaagagaaagcttcctttctagatgtagacctgctttgcttctctgagagtcggtgaacatgttagttctcactacctacaagatatatgctataagtacaaactgaataataaataagttgttcagcatcgtttatgttatatttaatcaacacaaaaataactcagacacacatgtacagctaactggatgattattggaatataaatgtgttggagtttactggggaaaatcagtagcccaaccaagatgtagtaagagccaaagaagttggtaataatgatagttacagttgtacacaaacttggacttggactccatggtactacatgaaactgacttcctcctttcagcaactgggaaacccctgacatgcaacaactccttgttcatcatctccacactgccacatgaaagaaaatgaaaagaacttgaaatctatgcccattgtatgaatgtgtacttgcttccatgagtgggttcgggcatgtgtgttacaagagctacacatgggggtcatagaattgccttcaggagtccatcctcacacatgtgacatgccctatgcacagagatgagagaatagctttcaggtgccatttcttaattttctactttgtttgagacaaggctccttcgcttctgtgcacaccagggtagctggcccaagaggattcagaggctatcctgtctcagccactagctccctataggaatatatgagattacaaacatgacctttgtgcaaaggctggtaatccagatctgacttgtacggcacatgttttcacctactaagatattacagacttaagggtttagcaaacttgaggatactatatcatctataaccatttggcatatcttacttatttttcttcataattatagagaaatcatcccaggttgttgttttattggttaaccctaacgctgatttatgtgagatgaattatgcttttgttcttctttggatacacatgtcagtaatgtcgtaacatctaactttttccagatatctcaacttctttttctacagacataattttctaacttaaagattatattttgctgggcggtggtggcacatgcctttaatcccagcacttgggaggcagaggcaggtggatttctgagttcaaggccagtctggtctacaaagtgagttacaggacagccagggctatacagagaaaccctgtcttgaaaaaaatcaacaaacaaacaaacaaaaaacccaaacaaacaaacaaacaaaaaagattacatgttaagtactatctttgatcttttaaacttatcctccttatgtgcacacttgtacacattatttccttaaaaatacagaaagcaaaaccacattgtacagacatccactgtaacactgcatttttaaaaatgtactctgttcagcaaactctgaattccctttcccaagataaataaaatacaaagtcaaacaaacaaacaaacaaacaaaaatgagatgccttttattttcctgagtgagcaataatgaataaatccatgatggtagccccactagtccattgttagttttaatggtttaggacaggatctgttgagaaacctctatggatgatgggtaaaggatgagaccaaggatgtgtgagtgttctagtcctgagcactgctacaacagccattaatcaagtgttaaccttccaatttctaatcataagcaagagcacagcacagtagatgtgagccttcttgttcgaattattcatttgagaatcagtcaaccaaaggcttccctgacatctaaaaggctgagcgaacaatgggtgattgctcaggaaatttatgagaccgacatgagtatttttcacatcccacaaaagaaatacaacaaatgctttgctgacaaagctctagtcattacagattttatattccagtttactgagcagggagttctctgaggcagatggcttgcttcatcatggaggctttcttgaggacggatcacttagagaaaactacagagatgtaattttatcccaactctcagcaataggccgttggatgtcagcaaaggtatgttatttttctgagggtcttttttttttttttaactttagtttcctctatttatccagcatttttattcattaagtgagtaaataacttttaagttttgtctatatgccagggttctgggaaggtttataaaaaagaaagaaagaaaaatgggtccttccttcagagtgaataagggcccccagctaaaaatactgtcaatagttaccattgtcttgtaatatcctggtaacaccctttaaaaaaagaatactcagaatgagttttcccagttcccttttcaatcagtaatgtaaataaacccacccacctggatttctgcaagaaacagctacctagtgaaagaggagatcacagccttctggacaggggtggatattggctactaagtactgacacaacacgtttagtctttgttcctccttttacctccatataaaacctatgaacaactagacacttgagtcctatcttgttcttaccagcatggagatgattaggggcttcccccactaaaggaaactactggtaatagcaatacacacatacgaacacacacacagaccacacacaccacacaacttgtgataagcccaggtcactttctgtttgttttcttgaatcctggaatggatacatgctataagcgtcatccatgaaaaatatgttttggtgcaccttggaaattactattttattattcaaatatatctctttaattctacttctctattttcttatttttattttgagccaaattatcccataatcacaatgtaataataactgtatagacttacaaaggaaaaacaaaacaaaactttgccctgtgaattactaacctatttcaaatagcacccagtaaaataaaattattgaacaataaccaaacaattaagtattctcttgaagaaccgtatttttattcaagcctttcccaatacttttgcttattcttctgtattgagaacatatgggtagttgggtagttcacaaagtttagaaacaacatttggactaatcctatatactcccccaattttatggtacccaaaacagtgcatattataagcgtttactcagtgttttaattacatccaccatattgtacaactgccaatgcaccactctcccacctctgactgatctgtaggatgagcacggtacctagtgagtactctcattactctcctgccccgtactctgacctgctgctcaccctcactcagcctagaaaccatcacaccacttcatactattgtcatttccttgaactcccaaggttcgtctcctgttttctttagtaactatttcttttttcaaggacacagaaaacatatatttgtgggaacaatatcctaacacatatactcaatttgcaataattgaattaggataagtatcatttccatcttgaggagtgtttctgacttagtgtaaaccccttaatccatctcctatggttattttaaatttattattaatgcttattcttctagttatattttccatactgtgtccatgcttttccaggcctactctctatctgactctgtttactatccatttctggcctttctctaaccctctcactgcttctcttttcaacttttatcccattctctgtgtctctgtgatcaaatgtttaacttccaaaatgaaataacatttaagttaaaagatataattttgtcttttatgttaatctttagcggcatggcacctttgatattcactcgcatggcaccatatgccactattttcttacattttaatgttgaactgaattctccaagcttcagctactgtaaacacggctgtaacaacatggacacacatgtatacttgaaactgcgctgctctgtgggctctacatttataaaaggagttgctttatcacataaagaaatctttttaaaaaatttagtagcaatattctgttttccattgcaaatattctggttcatgttgctgccaaaggtggaatccaattttgctactgtttgagaacacttactatcttttaaaaatataaaccctaaaaatgtaagttcaccatattggttttcttagagttgggatttgaaggtgccagttattagtaattctaagcactttattatatgctatccattcacatttttatgtccttggagaaaaatactcaacaatttttatatctttgaatcattcttctattttgttgttgaatatctggctattattcttttatcagatataaaattttaaagtttttctcaacactgttttattgttttgctttatatctcttgatagtttctcctgatctacaattaaaattatttttcatcctgtttgcccacaatttcctctgttgactgtgtagttgacatcatgcccagaataccactgctggttgatatcatgttgtttttgccttatactttcctctatcggctcttagtttaggacttacaattaagttaaggtctgatccaagctgagttaattgttgtatattacgtaacctcggaacccaactttaatctcttgcatccaactgtctttccaccctttttttgagcctatccttttcctcactgatttgccataatacttttgttagaaatcccaatctgagatgaaaagatggaccatctagagactgccatacctggggatccatcccataatcagcctccaaacgctgacaccattgcatacactagcatgattttgctgaaaggaccctgagctgtctcttgtgaggctatgccagtgcctggcaaacacagaagtggatgctcacagtcagctattggatggaacacaaggtccccattggaggagcaagagaaagtacccaaggagctaaaagggtctgcaaccctataggtggaactcaatatgaactaaccagtaccccggagcttgtgtctctagctgcatatgtatcagaagatggcctagtcggccattatttggaagagaggccccttggtcttacaaactttatatgcctcagtatgggggaacgccagggccaagaagtgggagtgggggggggagggatgagagtctgggggacttttgggatagcatttgaaatgtaaatgaggaaaatacctaattaaaaataaataaataaataaataaataaataaataaaaaagaaagaaatcatctgcccccacatgtatgggttacctctcagctctgtacagcctactggtctgtacatgtaggagtcagcacactactgtggttcctataaccttacaagaatgttccaaaccagaacctatgactcttccaatttgttttcatcccacttccatgggtatggagatttctttgaaatcacccttgaatttcatagcaatctttctatcttacaaatagttcactggcatatgcaggtttaaaggtttaatggtattataggtgggattacttatatatcttgtttttaatttatttcatttctattgtgtaaaagttaatagtggttttctgtgttaagtataggtttctattttgttatcatttactaattccactagatatttcctgctttttgctaactttgttattttatatatacagactcatgtgatgtaacaaaaggagtaatttcacttctctctttcttgttttgatttcttttaatccttgcttcttttattagaaatgagcattgtagtcttctaaaaatatcatgaaaaggctttcagttttcacaattaagtagaaaatcacctgagcatttttatgtgtgacccttattatcttgagatagtttattaaattattttattatatatttatgaaggttttacctaaatagatctctgctctgtgcattatgtgtttgcttgatgctcacaaaggctagaagagacacaaggtctcttagactagagttaccaatgactgttacctctttgtcatcctataaatatatgtcttttttattgagaatagactctttttttcatacagtatatcctattatggttttctcttcctctactcttcacacagttcctcttcaccttctctcccctctggatccactccctttccaactctcactagaaaagatatataccaataatccatgctgttagggaaaataaatgatatttatatgatctggacttatttctaagtattaaaaattaccatgagccgcttaatactaatgtcttagctcttttgctgacttgaacatggctgtccacaaagcagggcagcctagctctgaatccattcactgctgagtggtgagctgtatgttttcctcatttctggaatgagaactgacagtgaactttttagggtccacacaaagataagtgtaataaaaactttgagagatcagctgctgtcagagcaagtggcctaaatgagaataaaatctagttattaggctaaaatctatcattcatctaggccattgcaggttaatgtttttatcactgtctctctcttcatgacttcggttccctatggttgtctacatcctgttatagtttctcccccagaatcccaaaagaatgggtgagaaaatagacaataagaaatgagtcaagacaataagaaagaatggaaatgtgaaggaaagaggaaaacatgaagtgttataaaaatgcacactgcttctttgtgtacctattataaactcatatttattattttgtttgtatggtgaggaatcaatttaattggcttcttcaaccatcataatgatttgtttacattaatttactaaaggaacatattgtatttttattaatttgttccatgggttgtcaccaagatttctcacctgattttatagttatctcaacttttttaagataatatgaatgaagaaagcctatgtgttttgttatactgtgcatccctaatttccttatgggcagttttgatgagaaagcattaagtgtggcaaatgtaagctctgcacaatgctgtgcagtctgagaatgtcctcatgttccttcctgactcccaggcccctctgtcaaatcacaccacgccagctgagtgggtatgagatgtttactctgccctctagcatagttatgagagaatctcgaaacttgtagtgctacaaaggagcatcagagagtccacctggctctacttggatctcctctgtcctgaatggtcagaataaattgtcatgttctctattgcttaaataagcagggaccttcctctgtctacctaattgaaaacgttcacgagacaattgatacaaattcgttaattgacaaactttaaatagtaaacatgaaagcatacattattttcttaaactatagaagttaccataaaagaagtcagtcaccttactcaaggtagggcaataagaaatttgtccccaaactggttctaaagcaattcaagaccactaaattatccatcatagaaaatagagatgaataaatgggacctcataaaattgcaaagcttctgcaaggcaaaagacaccgtcaataagagaaaaagaccaccaacagattgggaaaggatctttacctatcccaaatcggatagggcactaatattcaatatatataaagaactcaagaaggtggactccagaaaatcaaatagccccattaaaaaatggggctcagagctgaacaaagcattctcacctgaggaataccgaatggcagagaaacacctgaaaaaatgttcaacatccttaatcatcagggaaatgcaaatcaaaacaaccctgagattccacctcacaccagtcagaatggctaagatcaaaaattcaggtgacagcagatgctggggaggatgtggagaaagaggaacactcctccattgttggtgggattgtaagcttgtacaaccactctggaaatcagtctggcggttcctcagaaaattgaacatactactaccagaggatccctcaatacctctcctgggcatatatccagaagatgtcccaaccagtaagaaggacacatgctccactatgttcatagcagccttatttataatagccagaagctggaaagaacccagatgcccctcaacagaggaatggatacagaaaatgtggtacacttacacaatggagtactactcagctattaaaaagaatgaatttatgaaattcctagacaaatggatggacctggagggcatcatcctgagtgaggtaacccaatcacaaaggaactcacacaatatgtactcactgataagtggatattagctcagaaacttaggatacccaagatataagataaaatttgctaaacgctgactgtgagcatccacttctgtgtttgctaggccccggcatagcctcacaagagacagctatatcagggtcctttcagcaatatcttgctagtgtgtgcaatggtgttcgcgtttgggggctgattatgggatggatccccaggtatgtcagtctctagatggtccatccttttgtctcagctccaatctttgtctctgtaaatccttctatgggtgttttgttcccaattctaagaaggagcaaagtgtctacactttcatcttcgttcttcttgagtttcatgtgttttgcaaattgtatcttgtatgttgggtattctaagtttctgggctaatatccacttatcaggaggagctagagaaagtacccaaggagctaaaggggtctgcaaccctataggtggaacaacattatgaactaaccagtacccccccagggctcgtgtctctagctgcatatgtatcagaagatgacctagttggccatcagtgaaaagagaagcccattggtcttgcaaactttatatgcctcagtactggggaacgccagggtcaagaagagggagtgggggggggaggggagttaggggagaagggtttgggggacttatggggttgcattgnnnnnnnnnnnnnnnnnnnnnnnnnnnnnnnnnnnnnnnnnnnnnnnnnnnnnnnnnnnnnnnnnnnnnnnnnnnnnnnnnnnnnnnnnnnnnnnnnnnnnnnnnnnnnnnnnnnnnnnnnnnnnnnnnnnnnnnnnnnnnnnnnnnnnnnnnnnnnnnnnnnnnnnnnnnnnnnnnnnnnnnnnnnnnnnnnnnnnnnnnnnnnnnnnnnnnnnnnnnnnnnnnnnnnnnnnnnnnnnnnnnnnnnnnnnnnnnnnnnnnnnnnnnnnnnnnnnnnnnnnnnnnnnnnnnnnnnnnnnnnnnnnnnnnnnnnnnnnnnnnnnnnnnnnnnnnnnnnnnnnnnnnnnnnnnnnnnnnnnnnnnnnnnnnnnnnacctaattaatttttaaaaaggaccaaaaaaaaaaaagagaatatatttagtaggtgaactttttccttttggctcttatacagtatgttaaaatatttgtttcatcttagtcatactgcatcccctccaggggacccttatgatatttgtctgtacaatcactgtagctgctgacatataccttctttcaacatatttttttccttgactgcatctttctgaagtatcaaatttccaaaagcactgtttgaaatttgcttatatttaccatctattatttaacaacgacagcaacaaagagaacacatggaacaaatagtacaaaaggccaagagtttgagcctgggagttagacattttaccactgacctttaaaaggaaggttcctattcatccatttaaaatgtacttcttctcaaatgatcaagtttcctcttcactctctggctgagttatacttcaagaagaaaataaaaacaatgtctggcatgggacatgactacaataaataataaaatggtgatatatatgtatacatatatacatgtatatggatatttctacaataaatgataatagaataaatatttgctctgattaaatactacacattttatatacctgtgttaaaaattaccatagccaccatggatatagtactatgagccaaataaagtattttctaagtagtctactacacactagaataaatttaagattaaataaaattaagaatatagaactcaggcagtcatcccacaaattagttagtacttatatgaaaaaaagaatttgaaagaggcagtgtgggtggctgtagtctttgttttcaagttttcatggtaacaggaacaatgctttagccattatccacatcatctggacttgtatcttatactcttctacctcaacattggatcattcaaggactcggtgaaatttctaccatgcttacaagacctcattgattccattgtatttagttctggtttttatttaggactttcaacagttttttcattaagtgttnnnnnnnnnnnnnnnnnnnnnnnnnnnnnnnnnnnnnnnnnnnnnnnnnnnnnnnnnnnnnnnnnnnnnnnnnnnnnnnnnnnnnnnnnnnnnncacacacacacacacacacatgtattaaacaccaaatctatctatccatccatccatccatccatccatccatccatccatctatctatctatctatctatctatctatctatctatctatctatctatctatctatctatagtgccaaaaaatacatcccttactttggaggttctgtccataatgttaccagtcactctccaaagattacacactattgccaatgctttggattactctctctccagaaagtgatggaaaggtctagtagatgaagaccatggagaaatcaaacttgttcagatctgggagcttcatccctcgtggctaactttcaccctgctagaaggtgctatgcttgctatcagatccaaaaactgatcatcaatgttacttaatttccttatcctaaaatatacttccttattcttattgattcataaaagtataaacccaagacccagtgctatctttccttttccttcttgcacaatcacatttctgtcttctgcattcattgttaaattataatggagcatccaaagcctcatcagagtagaagacacatttacaacttttctaggtctcacgtttattgacctaacaaatgtttatgtgcaatttactgagtactaaacaattctttttacttctttcaccagacattcttactgacaatagaccttaaacaactaaaaaatatataccattatgttgtgtcttattctcaaatcaatccccatagtaattaggtgagtggttaggatctacaaaactgtccaatggacagaccatgtcatagtctgacctttaattgtaaagtgttcctggagaagaaaaaataagtctttattagagactgatttaaattaggctttaattaaatttacaaaggagtgtatgtaatgaagtagaattgagtgtattatataaattgcatcttcttcaagtatgaattacttatcctttttaagagatcaatgctgtcagtcttatttactcttcacccattacacttaattaaagaagttcatgtctgatggaatcaaaggtattcaggaagacttagactcacagtgatccagtggcctccttgctgtggtggtggtagctctggtcctttgtgaggagcaggtgtttgcattaggaaacagctatcattctaattttctctaatcgacttgttggcagtgttgaccaagaatggagaagatggaagttcatggatcctgggcacttggcacggagagggccacagagtaaagtacctaatctctaatgaataaaagactctgggatgtcaatctggctcaggccactgacatttagtttccacgaaatattaattaacaatgatgaagttctccacagtggcatttgctaccaagcacagcttcttgctctatccctgaaggttttcttgattcattctgagtcccagaaagcaacattcatctctaaccttcagagaagatttagtacaggctcttagaataatgagtctcccgtgtctcttgggaagaacaccaacacttccgataaccaattccttgtctttacaaccctataatcaataaatgtgcatttaacactcccttttcatgatactcaagcgataataggaagagtcatctatttgtgcatgctgagagtcattaagtatttcttcagcttcctgaattcaaaattgaatgtttgtaatagaaagggtgaccaatcaaatatttttttaaaaaatctgttctatactgtgaaatatgtggactcccacataatatccataaccaaaaataattcccagggaagtctactatgatccaaatccctcttgcatgattaaatcgcattaaattcaaatgagaaaactgccacactttatttgcagagacaattgatacatttgtcaggcctatgtatctgcaacatttcttcaaataccaaaaaaataaataaataaatttattgtcgtaattgtcattaagcatattcctgaacaatggggtttgaccataattaatgattaattcatttggaattcattatgataatagtaaatgtgtttaactcatttgatgcttccatagtggcagcaattcttagcaattcttttgtattttactgattttaaacattaaaggctctgagcatgtgcaggaaaatagttccacattgccctctagtggtgcaccgataaaaaacaatttcttgaaaattgtaggggagaatattcttgggttttagcacactctaaaaatatcttgatctcaagacacattcaaaaccatatatatatatatatatatatatatatatatatatatatatgtttatttatttatatatatatacatgtttatatataaatatatataaaacatccctttttaaatatatatatgtttaaatatatatatatatatatatatatatatatatatatgaaacatcccttgcttcccataaatttgccattaaataattaacaagtttatcttccttgtgcaggcacattcagtactggatcaagcctagtgtagaaggggggaggagggaagcctattctttcctcagtaagtccagaatgtggacaaaaacataatgtgtaggctagagagcccgaaagctggatctcaaagggcagattgtaatactggtgatgtttgtaggagcaagtgatcatactgacagccagaacccaaaagaaaacgcgaggctcctttatactggcatgctccgagtgaccccatgccctctaatagacttatttttttaaggattcacagtcccttccagtacttggcatggcaatgcttgtggatagaaccttcatataaaggacttaaagttacattcaatctcctgagcatagtaggtctagattcatgggaatctattttgccagtaggagtttacttaaataccctacaaatattgaaagggttgttttcacacaaaggtctaggtttcccaaaagttccacaaagctgactgccttctttggactaaaggcatcctcaaactgaagaattgtttaattctcagctcctaggaatctttctactctatgatcttacatgcagtaagagagtttggcttactctttcttgctcaccctaattagacaaaaggaaacaaacccaaaagaaatttcaggcaaacaaatagctccagatcctgtgcctgtgaatataaaaaccctgctcccattttcataccaagataaatgcaaatgtagatgtatatgaggtggagctcattagattttagctaaaaaaaaaggccatttcatattgtgttaggtaactaccaagtataaatatctatgtttcaatatatagatgaatttctcagtctgaaataaggaattagatctagtatcccctcccatagctagtatcctctgggataggagagaagtgatttggtcttctaccatcttttcagcattctccgtgtgtttccttaaagtatttttactttctgggatctgtctaatcctatagaccatcttcttacacaagccctacctctgagtaaatgtctaccaaaatctcttctcatgtgacctgatccttcatgaatattgctgaccactagttgcagatgacattcataaagcacatcgcatattttcttgcttaaatttatgtagtattgcttttctcccctggtcagaattaacttactacagtaataagagaggttattgttttataacccgtcttgaatctcaaagaacacttgacatttgatgatccattcattccttaaaagtaaaatactttgacaacacacggatggacagacacacacacacacacacacacacacacacacacacacatacacacacttttcaggtagaaaccattcgttccatggaggtcaaagtgctgcctgagatatggtcgtatttcactcttcttgctatattgtacctctgtggacattattattttgaatgtcactatttttaacatatgcatttaaattacattaaaactttatgaagatctaatacattttcaaaatcattattaaatatggactcactcgttgtaaggtctcaccatcattgcataaattggcactgaaatacaaacctgacatgtgtagttacatgaatgcttttaactgacttcagcatgtttctctgctctgtttgctgtgctctgacagctagaggctagtcccctgtggcaagactttctaggtcaataaaaacttctgtaagagacacttagtgcatagggtttctcttaattttatctgggaaatgatgaacatccaatgcctagacaacttttattctttaaaaacatctgtaaattagtacattcatatatctttcttggtattgatatacggaagctcattaggttataactgtccttgtgatcattggaatgttcctgaatctgttgacagaagatcttctttgtcattagctggcttcttcctttctagtttttcaggatggttaaaactcagttgtgatgtttccatcttaaatcctggaatcacaagttctataaaagccattaccagttacagtaggcaacactgttttatataactgcagcctacacactagggtggcttcatattatcaatcaaggcttctcaacttcttaactctatagcccttgaccccagagaaaaacacattaaaaaaatttgaacttttttttttttttgtaattcaagttaaagaacaggagattttaacaattctgttttaaatctatgtgactctccatctctatcaagacttttgccttcaaggacacagtggatgtcaaattacaaccctcatatttgctcgttgttttgtttatatcttacttgccttagactgacaacagcaaaaggttctacatcataaaaatcactcggttgtttcttgcatatagaccactatagtgatccattgattcttgtatcactatagtgccagagcatgaaacaaaataaaatctctcctgtcacttagctttagttcattgactttattactcaaaggttagctttctgttcactgttggctctggtcattttggacgtctaaacctcattttctattagttccgatggttaacaaaatgatatgcaatggttagaaattaataacattttgactattctcacccactgtatttataactaacattaactagacaatcctttagtcatattttcttgtgtagaataagaagtaaattactataattttgttacataagctctttctataataataattgataatgatctaattttgctccaatgaatcacatatcgcttttatctgtgttcttcaattaaataaacaaaatgccatgtatctctttatatttattctgttcatgtgtgattttcttctttatggaatccatttgagttctgcactcacaaactttagtactgaattcctttttccacgtaaagtttattcattcatattttcttctcttggttttgtattctacttttcccattgattttgctcatggaattgcccttcatttctaacatatttgctcctctctgcatctgtgaactagggactttggttccttctcaagtccagttatacttttattacgttgatatgatggataccattaacaaatacatttagaggggaggtttatttcactatatacttcctggtcacagtcggtcattgaggaaagtcagggtttaaactgaaatagtgatctgaagcataaaccatgaatgaatgctgtttgctagctggttctcagcttcctgctcagctatctttctcctacaacctagttccccttgcctgggttttattgcctgccagcaaagcctggttactccccagtgtggatactcccataacaatcatcagtaaaggtagtctctcacagacataaccacaggacaatgtgacatgaccaattcttcagttgaaattccctctgctcaggtgccttaaggttgtctcaagttgacataatttgactataattggtcctgtcttggagtggatctcttacctcgtcagttccaagtgtctgtatttgttctttaatctaatatgctctgccttcttcactatctgacagttccttaggatcttccttatttccagtctgatgcccagttttgatttaactgacacagacaaggccaacacttggagccttgggcaatctgctggaaactaaaaaaaaaaaaaaaaaaaaaaagttgtattttagggtttgctgacaaacatcaatcatcacacaccctgtacagagtggctaatgctcttagttcttcaccctcttgtgcatttaatgctcaaatgaagattcaggaagatcgaaagcctgtctccattagagctggtggttcccagaatccaacacaatcattttcaaacatcaatttatttaaaagattatattcaatttgttttcaggaaatgttcaccgtgagcatttcaattcaataattcacatgtccaacttgtttctgctttcctctagagtcgagttctcattatgtaatctccttaaaagctttcaacaatgccggagaaggtgtccctctctacgaaagtgccaccactcgttccataacaggtaagcacctggcatcaatccgcttgtgacaaggtagtcagtactttgattatggggagaaggatcaaatttttaaaaataaaacaaaagacaaaatattaaaaatgaagattatcacaaatatatgcatgcatatgtatacaatatattttaatcatttggcttccagacgaattagaagggttttttcctatatgttagtatgtggacttatagaattcagcagatcttgcctttccaatcatctttgaagcttggtgctctgatgtgattcttcattctgctaaccagtttgtcatttgacactgtcatttgagcggaagatatttgatgtaagactctaaatgtccaatgcgtctttgtttctctcagggcaatccttcagataagggacaaggataagctggtatcttagagttgcttagattaggctaataacaaagaagaattgtgaattgggctataggtaaccggacaaatggatacaaagaaaccggctgaattaaagaccatttgcctcaagaatggctacggtagtttaacttgttcggcaggaaacaagaccaaaatggtggaacaccgggagacattgtaagatggcaaaacttaagctgggcatggtggtgcactcctttaatcccagcactcaggaggcagaggcaggtggatttctgagttccaggccagcctggtctacagagttagttccaggacagccagggctataaagagaaaccctgttttgaaaaagcaaaaaaaaaaaaaacaaacaaacaaacaaacaaaacaaaacaaaaaaacaaaaaacaaaaacaaaaacaaaagatggcaagacctaagtcatggacaatggccagttgtcaataatactgggtttactcagaaaatgcaatatatgtcacattgatggacacccagaaaaatcacatcaccattttgctcctaacaagattgttcccaaacacctatctaaaacctggatttagaaaaaataaaaaagtttatgtcttcaattaatatgttatgcctaccccatctataaacccacatccttcatacttcatttgattagccataaattttcactttaattagaaagaagtgtttaagaggtcaagttccaaatttgatatcaaacatcaaaaagcaaatgattactagagtatgaattgcagatgagaatgtataaatggctactgcctagatttatgtaaatttatatacttgctttgcagtctcacagtgccatgcacagagtaccctgagaattttttcactacccctttcttacagactatccaaaaagtaaggctgtctagaaaatagcagggttctctggccacacctgggatttcctggttgtccttatgcatgtcctctccatcctggtcctgataaggagactaagcagtttcttattgtcaaggtgacatcaatcacgtagctataatcagctgatataaagttctaccaaagacagtctttgaaagattttccattattaataacaaacttaagtcccctaagtagggactgctgggtatagggatgaaagtcagttttccaataggacataactgtagtgaagggggcagagttcagatcaatggaaggtaagctgtgcagaaggaatcatctgtggtattaacatctttccctgtggcatttgctgtcagtttttaattcttagcatatggcatgccacagtgttttctcaaacaccagtgatccatgacacaggttttattttcatgttataattcagactctaatggagctgagaaatgaagtgataccaaagttggaaattgtgtcaggatacttctttttgaagaaaagacagtaatgggctgtaaaggagtgtttgaagcagccatctcacaataaagaatacacctttacctggaaatagaattatttttatgctttcatgctgcatggagaacaaagagcaaaccaaaggaatcaaaggccaaggctctgagagagtctcgaatttataaatgtgtcatattgtcatgtaaaaaccattctttatctttgagttgttgcaaagtattcccataagaggtcttggaaaaatctagcaaaaaagtatacacgaaatatatcaaagacaatgaaagcattaggcgaacgtgagcaccaggccctggagcattctaaatgctgtgccagtagcctttggtgacctctgtagctttttctcagactgggaatatcagttcaagctcctgaaactttcaccttggccccacacaggaaaactccctcttctgccatcaagctctttatctattgttgttgtaagaacaaattgttttccacctggagaagggaaaggtgcagagaataattggaggttaatgaagtacatttgaattaatgtattcttaaccattctagcaaggtttaaacaaagcataatccagtcaaaaactattattgattttaaagacaatttcaaacaaatataatgactaaaatttcaggcggctaccaaaatatgttaggaactgacttttcatatatatatataaaacaaaaagaggcaattggttataggaatgaaagtcggttcttcaatagaacatgatagtagtgaagggagcagagtttagataaatggaaggtaagatgtgtagaaagaagcttacctttatactatactataatatatatatataatttatatatacatacacatatatgctcacatacatatgtacttcttcacatgcctctgaaatttagcagcatctaaggtattctaaaagaggaagagacattaaagaacagtttagtagcaaaaggaagcttacatccaattattcaaaatcttttttaccagaatagaaaagaactcttacagtatatgtagcatatattcacaatgttgcttgctgtctcccagaatgctctgttctgccatagacgcagtctatctggtctttcccttatagcgggaactaagctcttagggccatgggagggtttgacattgtctatcacagcaaatgaataaatgcttaaataattatttatttaacttaagttggtatcatccataggacatatggctattatattatgcagcacagttatacagggattggcaagggaagtaataaaatgagttgtattccctaagacaggaaataaaacttagccattggcaatgttttgttttgttttgttttgttttgtttttcagtttttatgggtcaccttcgatccacagctaactcacagtagacaatattgctttgaatacaatagactcattttgtaatttattctaaaataatcaataaataatagccatgaatagttgtgttttctaaaaccataagtagataaatgggctattgtatggagaaaccatgcttgcacacactcagtgcagcaaagtcataacataggtggtacccatgatggagataagtcaaaaataagtcaggcattgaactactcttcctctattcataaaattcttcttaaaaagtcaggcaggagtagaacgtgtaagcctgtacttactccagtttggcaaacatcttttccagcttcacaaaacagatggatgattcaaatccttgtagaggctgcagtgtttcctattctctttttataatttcataaattcatttgactttgaaggggctcttaatgaaaagagacaccaaaaggaaaacaaaatcctgggctctgtcattaaattttaatcctgaacctccctccctccctcttctcctcccccttttctatccatccccttcccctccccttcccttcccttcccccatctccctctcccttcccctctgccctttctcttccttttccttcctttttgttctgtttttgggtttttttgtgtttttattttcagtttttaaaatattttctccaaaccacaggccagtaacatgcttaataatttatgggaaatacatggggcatgggaatttgaaattcaagggacagaggaaataatcaacagagtagccaacaaccacccagctttgaactttgctatttaaaaataaataaatgaataaataaatcgtgtaagctgctgcagacattcatctacactttttctgatctcattgtttaaatggcatcaagtgtccaggcttagcttggcgctgtcagtcttaaatttttgttagtatgattcccttactgtgttatataaaggtcagttttaaaatatgctatctatgaatttgaacgtctcaaaatggaatgattgccattgccacaaagtatgtttctgattttgcttgtcttagcatagcagaagtgtaagggattttggagaattttgttaagatcacaccacatgcgtcagagtccaatcgtgttattgatcagagtatgtgcgtccctcaattgaaatctaatcattctgaagggagttaatttgtcttcctaaccagtggtgtgcatttttttccccactgaacttgtagttttagaatcaggaatgtaatataggcgtgcctggcaggactaaagatggtattaacccatgtgtgagaatacaggagaatgaacacttccatgacttaaaattacaatctaagaaaacctacttgccaattgccatctcacaccagattatagtacatcagatataaaatgatccacgtgactgtgtgaatttgttcacattggatatgtgcattgatagaaagactgatataattcaagcacctttcattatagtttgtatgttgcctgaacaaaatctatacagatataatatagaaaagactaaaagcaatacaaaaaaaatatacagtaaatttggggataaagaagaaaattaatgtatccaatagtatttatttccatttcaggaaaaatagaaccagaaatatcattttgctgttatttaaaaaaatcattgataaatcaagaacatgataaattcatgtaaacataacaccttgaaaaaaatcaatgtataatattctaacaagttggagccttaaggtatatattcttattagatataaaaacgaggaaatactattattttatgacatagcgatactgctcttattatattttatgatttaattaattgcattttttctgttcttctcatgttcccttccatcgttattgccatgcctttaactcattgtgatgtgttgccactgatatttattttgactcttcgtttacacatttatttgtttgtttcatttggtgggttttgaacccagatcccactgaccccgttgattattatcctttgcttgatgatttccccacctcgggcccagatgtctccacccccatgctcccaccagtaggtgtacaggctgtggctcttacccatgaggctgtgagggtcagctgggcagacaactctgtcccgaagaaccagaaaacatccgatgtgcgactgtacaccgttcggtggaggaccagcttttctgccagtgccaagtacaaggtgaaggtcgaatagagtgcaagaaatttaaaattaacttgtatatgtttgatgagttgtgttcaatgtttcctggtctgttgtaagtcattttcctacagtgacttttacatacaagatgtgttaataactcaaagtctacaattcattagaataattgtgcctttggaaatcaataagaggcaaggtagaaaaatatcatgagctgaaaagctgatctttgaattccaccatatgctgattacaccagatatttctttctgtgtaaaagaataccactttcctttggaaatagcaaggctctaaacacatcttctgaataaattctgatattcttctaatttacaatctaaattgctgtccattaatatcacagacacctactcacaagagtttagcagagaataagcgatgtgaaaatatttttattacatcctagaaatgtattgtatgccattaacgttgatttctgtatttaactcaaaaccaccctcatgctgtaaagaaaatcccttaaatgaaccagagttataccagcttcctcctcatgtattcattttcaaatcatttcacactcctcccagagatccttggtggtataaaagacactgtcatttcacctctccatatctcctctccgagctcagtgattccaacactgcaaaatgtaacaaagcattactcacaaaggcagctgtgtagccttataaagctgaggccaggctaaaatttctaaggagtagacagtaaaaaaaataataagaagaaagatcagccagcacatatttttatctataacagttctagatcatctattttgaaataaagctttaattctccttactgaacatgtataccttagaatgcttcatgaacacatctcaatagatgcatgcttgaaagaatccctaaaggagtcagatcaggtgacacaatttcaagactctggatactaaacgcagatggattggcaagaatttgaggccatcctacgatagagtatgagaacttctctaaagctaggaaaaagatggataccctaatactaagggatctggtagcttaagctgtctcttccagttttctcattcttgtatctctgtgcttgccaatccccaggaatggctgttaaggggaaccttgcctcaagacagtggagacttggttgatacctctgtctttagagattcttctgaccccaaaactggagatagaacaaaagcacactggttttacaagcattcctctctctaagcagtcatgctggatctgacttagtgtctttcatcttctaagtggtcaaaacactgtggtttatgatgagtcagtctatagttgaaacaaaaccaatgacaacaaaatatggtttcatttgatattgctgccctgtgagagcaggtattagggaaaactccccaggcaagtccatacagtatcagtgataagagatccattgtatgtaatccatctcctcatattattagatgttagactgagcagaaccagaaagaaagacaacatagtcaggaaagcaaaagaagacaacatatgagagtattcaaaagtatctctacctatagatggttcaggtttaagtttattttaataaaagactattttccctctttaagatgcttatgctcataattacactcatttggagacatagttattgtactgtatggccatagggactttgccagaatgtgaaatgacattttttaaaaatgactattttatttcagcatgatttgaatgccaagatttcttgaggcaaatcatttgagttaaatggttagtagagcagacatggagctacaaagaatttgaaaaccaagcaaaatattttaactagatcttctcccatcaacttaaatgactaagggcattatttaatttaatattaacaattatcttcacatatacaagtacacatatacacacacatatgcatgcacacaaacacacacacatccacacttctacttctacacactgagatctagaagtctctagaaaagagttgggtagtggagtagcaaggagaagggaaagaataattggtctatgagaaagatatataatatattttacagttatttataatagatgacttggtttgtactttatgctttttaaaccatgttcatgactaaatgtcatctttcattgcataatagctttataagataagcaagacatattcattatagaacaaagggcacatctgcagtcaaataatatggatttgagaggtgcttttgctgtattttgtcatatcacagagtctcatttttctcaaattagacagtaattctgacactaatattctgattgctcaaatcactctattgatttttctacaaaaatatgaacttcttttcattttctacaatggtttaatcacattctgttttacgtgaaatccactcaaaataaaattattgacagtaacccagtgcttatcagatgcattgtggatataataggatacaggcagttgtgtaagacttggtctcttccccaagatatatctcattctggaatttaagataactaatgaaatgaaagtcgacatgaaacaaggtacaatgtattgtaggtaacatttattaatgcttgctctgaggcaagcactgttctacttcacttatttcacacagtaaatgataaaataatgtctgtcatgttagtatcaacttagattgagcaaatggaagttcagagaggatttcccaggtactctctattcacaaatgcaaccagatatgattttgcaatatatgtttaggttgcaaaaattcattatagcaaaagctttctactaatatacagagaaaacattctgataaatgttcctgagatcttcaatttaatataatcaatgggtacattgtcatatattactagtttcttttaatttttatttggtgatatatatatatatatatatatatatatatatatatatatgattttcagagctatgatctaatcaatatatgtacaaattaatattctgccatattactgtaaaagaagtgaatacatatatatttacccaatggagtaaataaccaacacatttttaaatatagcagtcctaggaagtagttaccttgggaaaagacaaagataactaccacccagcacaagcagatgtttctaaaagactcacatagtttaaaatgtgtcaagtcatgtagaaaataagcttttacctgtgagactagcatgcttttatcccctttattattatttttgttctcgagtaagcaagaaagacacagtttacttattttgtactattgtaaataagcttatttataatgaaaagaatatattcaaaagtcaaatacaacattctgcaatacagttatgtcctttaatattcatccaacatgctttccttttctgatcaatggctcccttttccatacatgttctcttatgcatgaaggaggagcatcatgtaacatagaaacatgcttactctgctttcatttaagagatcgatatatgttcagaagcattaaaccttgaaaatacgtcttttaaaaacatcatcatcatcagtagaaatgcattagaaaacaaaataattgtttgtagtgagaaaggatggtgaccaacagagaatatgaaacactatcttaaaaaaaaataaaacaaaaaaccggaaagatttcagtgacaaagacatgaatttacctcaggttccactagaaaagtgttaaatgaagttgagggcagatttatgtcctctgtctcaggtatacacaggctcaggagattacctaacttccttcccattggaacactacacagcttgatttaatcactaaagtctcagaagcacagcccaccagtatatattggctgacagagaagtgggcccagcacctcccctattttgcagtgcatctacttttgtctgaattgttggccagttgttttacatgtcttgattcactgagttcacagatttcatattgtttctcttcctttgcttgtttccggtacgtatagtcagaagacacaacatctctcagttacacagcgactggcctcaagcccaataccatgtacgagttctcagtcatggtgaccaagaacagaaggtcaagcacgtggagcatgactgcacacgccaccacctacgaagctggtatgtgaagggacactgccccccaagggccaagctcggcccaggtatcagtgttcactaactctgtggaagtcgaggcatagaggtagtatgcttttagaagtgtgccttgtcctttgtgaaataatgtcatgtgcaattcacagcccttctgcatctcatggtattcttctactcctgtagaagggagaagttttcaatgcattaaacagtctggttgcatggttgatcggtggattttcagaacgagttctttagaacattaacttgtggtacctgaacatggattctcttcaatgggtttaagtcatgggcaggaatctagctagttagtgaatgctatcagaaacaatggtggctttgaacaacagtcctgacaggtattgggtaacttgagacaaagtaaaacattacaatttttgactcctggatatttattctaactacaacagctggaatagagaatacttttcacttggccttggacatactttggaaagagaataaaacaatgggaaacctttatgcacttagagagagctcaaaagtatgcatccctagccacttagtcacctctccaaccgtaatagtaacgattttaattgatttcatattcatgttatgtttgtgtgtgacatacactaaacatattcaaattttaatatggcagtaatgttgacaactgaacaaaattactgtttttccactagaaattttcctttggtgttgcaaccttaatgttattacaattattactttaatttttagagttctataattggtaggtacttctgtctataaaaatctttctaaatagtctcatttttaacatcttctcttttagtttacttactatacatcattaagcttttctctattaattctgccattgatgccaatgtttgtagtttctaagaaaagtcaggaccagacaagtatgttacatactaccaagaccataaaatatcacctcacccttccttttactccaaaagatatgcgtggaatcaaatataaactagcaaaattcctaaataaataaataaataaatactagcaaaattcctaaataaataaataaatagaaaaagcaacacctgatatgacttgactgaaagaatagtcatttcacctgaaaggaaacaaattcctccattttaccattcacaaacataaaatgcacaccaccaacttgcttgcaaaatgcaccctgaatatttctagtcaactaactaactcaatagagccaccaatggtgattcccaatgcagacaaaaaagatattaagtttgaaacctgtggttagtagaaatagtgattgtcaactcagataatgatctgaacaaaggtgtaaatagcatgtggagtagatccctgggtgatgatgagaagaaagatgtaattcacaagtgtctgtagattctgtaactgtgaggaggaaatgaggtggatagaataactcgagaatttgctttaattctgaaatcagatatagactctgtgacttcattgccccaagctgaaatggctcataggaaacataaaggtgactgggaaatttttaaattcaaatttttcattctgtccaaatggacaatcttttattctgatttgcttaactaaaataaaaatattagcaatattttcttcttgtaagacaaagtataaataataatttcattggtatcttccaggccctaccttaggtatgagatataagagatagagattacagcctctatattagggataattaaaatcattttaaaaaagagaaatatatacaggaataatgaaataacataagaaatgcaatcaccagtttggggatgtattgaaattatagcaggcagcacaaagtacaaatttactctggaaaaataaggggaagtttgacaaataaagaaaagctgaatcatagcctgagggagctattaggtactagtgtgcacctcaggaacgattaggcccatttccccacatacttgggggaaatgtgaagcccatagagaaagtgcaattacttgagccactaactctattaccaaaatttctatttatcatacacacagccaggataaagacatgcacacacccagaagaggtgacttagaaggttggtattttgagtaacaccttctcagtacattactgtgcattacagaacaaattgaagaattgtgttgttgctgttggtggtggtgtttctgcctgttttaaataccacggctggctggtgaaataacttcctcaacaccccttgtctatttcctaaataaacgttaatttgaattttaggtcaggaaagagtattctgactagctaatatctctaaatttcctttataatttacaatttctcttatatgctctgtagaatatctaaatcaacttctgacgatacctaatctttctcttcatgggatataaaatgtcatgaacgaaatgcttaagaaagtaatccttttgtaagatacctctgatataaatctatgctgttcttccaataatgtctcttgacatatgttttatctcctccatttcatcccttgccttttctttcttcttattctcctcctcttcttattttggtccactctcttcagcatgtttctttgaaaatttaaatatgttaagggcattgtcaacatatcgaaattagcttaacgttggattaattagagtcccagtgacctttgaggaaaaaatgtggtggatagaaattatttgtatctttcctattggcttcatatgtataaatacatagaaagatattctgtatatagggttgtatagctaatatactgacttaccctacattacatttaggaaaaccaagaagaatagaatgaaaatgacttcaaggatcaaattctaactctcttgttcaccagagtcctatttggaaaccagaaaactcttgcaggaaacatagagaccagaaacctcagaatctgcctgtgtcaaactaatgattaaaaaaagagactgcagataaaggatttagagcattgcttgctacttagaagaaaagctgtcttcaaaggggttataagcagagcagcagaaatctagcacatttggtcctactttaaaatatatttacattttattttgcacagtgtttaaaagaaatagatctgaggtagacagggtttctttgccatcttattttgtgccacattgaagcaaaagcaccttttctatttttgttcttcaattgctgttctcgcttagaaaatatttaccatatcatttaagctacaagaagatctgacctgtttcatttttgtctgtttgtttttctttctctctcttatatttttctccatggaatttggtaggttttttttttcttttcttcaattataaactacagttgcaatagtgtccttaatggaaggcatgcatttttttttttttagtttactaagcatatatttttctacttacatacatgaatgtgagctcacttaaaatcccatgttgcattcttgagctcaatgcttcctctgtatactcacaccttaggaagacatctgacttccacggtaaaccatcaattctataccctgacttgtatcattccaatagttgtgactaattgtaaaaggcagaataaacatgatcttcttagtgatagatcctgattgtgagcaccaagacaaagtgtcacgaccaatgacaagaccatgtctctgtctcatctcacagccccaacttctgctcccaaggatctgacagtcattactcgagaggggaagcctcgtgctgtcattgtgagctggcagcctcccttggaagccaatgggaaaatcactggtaagcatccatctttctctcccaaccttgccccatcttgaccatcgttgcttacagttgcttacttcacagctgtccttgcctctacgtggagggtctatctcagcatcttgcttcatatactcatctcctctgactggctcttcttgttctacactgagggagtagttttctaaagggttcatacaggtacacgcatatgcatattcacattcagttgctgtgtgaaagacatgcatttcaatcaggattggcattttgtgtttcttcatatggaccattaagacaaccagctatggagtatctgtgtatgtacaaatggggaaaaagaatatggttggttgacatttacagaatataaatgatttctaatggccttatattttttgtgtgtgcagcacatgaaggaagtttgtcttgggatttttaacttctcttttagcttttagcttcattctttaataataaggttcaggaaaatgattaatattgactgacagaaattgaacataatgaatatttcacagtgacagattttatattatcaaatattgctgataacaaaaatgcctaattaaagcatccattagaagcctatgatgttaatttagtatttaaaaaaacataatggggttctattagagtttgccttccctattcaacttagattaatttaagtttttagtagctatctccatagaattaacttatcacaaaaaataatatacaacttaaaatgtgcacattgcagccccatgaagcagagccattgggttagcaatttaaaagactctcttcagttgtctatatttacatacaagagatacatggcagtactacacaaaacagtgactgtgtcctcctgtgatgcagataaaccaggaacacgcagttttagttggcaaactcagttcatatgctatgctgtgatttttttttcaaaatgaaaagataatgtgatgcttacaaatgtgattaaaatttaagttgaagtttggttttgtttaggaaattgctcttagtgtaatagcaaacagaattttcatatgagctgataaacatgaggcagaacctaaacacaaaatccctccgctcggagcatatgcattcctttttcagtgtgccaggcctttgaaaacacaggctggtacatctcatttttttttttaagtctcattgcttggtgttctggtccaccttcattgattccgtttcagtacttttgtagtttttaatttatttatattttatttcattataaacagttacttatagacataaatcaaagcagataatatcttaaaaagaaagaatagaaattttctaaataaaaacaaggtatgatagaaactatacgtagtgaagaatgaaattattttccactaccatgttccttactctgaactcaaataaatcttctgcttgtcaaagtaaacaacagaatgtgtttccaactctgaaaaagaaagcctggatgttgcttttcccaagtgaaagttagaattctagcccatattaagaaatcttcacttctatttaataaattttaccctcatgctagatcttggagatgtctatatagtagggtccatcttcctaatgtgattaaattggatgagtttcctttgtctgttttacacacacacacacacacacacacacacacacacacacagtcgaagaatcggagatctaaaaagatgatttatttattatagcaaaattgtgatgcactgtatttaattcagtaagaagaaaagataagaaaccttggggactatggggaagagaaaagagacaattggaagtataaaaattgtgaatataaccctgatgtattatatacatgcaagaaaatatcataacaaaaccacacacacacacacacatgcatgcacacacacacacatacatgtagttttaatttttttaaataaaggtaattgtaaatgttcatgaaagccgagcaattagcaccatgttcctgtgtgctacgcttccacacattggtccctattaacattatattatgttatgttgcattatgttatattgtgcaaattattttcgacctacacagatgtattatagtgcctgcatataaagaggcactcacacacaatcaatgagtataaagataaatataataaaatgaaacaagaatattttttagtttttttctcttttgcctatattttctttttttatttaaaagtttagtttttcatacaatatatccatcatattctttcaccttttccaatttctcctggatgcttctgtccannnnnnnnnnnnnnnnnnnnnnnnnctccccctccccctccctctctctctccctctccccacttcagccctctccctctttcgtcacatatgtggtacttggatccttctgaggagaggtgaaattcaatctgagaacactaaattaagcttggcagatacacaatatttcagacaggggcaagggggactcaaaagcatttcaaaggaaacacagcattttaagaaagtgatacataagacattaaaaatcattgatgctttttaataagatataccacctaagtttgataagcctaatgttcagctctacatatcacataaggagaatcgatttggggtacatatgtaagttagacaaccataagttactgtactgttcatgttatagaaacatactccctaaaatagaactaaagccctctaatgacaggtactaatatttgagataacaaacatgccatctttagtttggggatatgtattttgcctgcctaaggtagaacagaagaaatagttctagaaggcacagtgtagagactctcaccacatcccttttccaaccgtcttcattgtttgtgaaaggagactacacaagccctcctacctcctcagggtcactgcagtaataaaatgtgactgttcaggtgtatgatattctaaatatttgcagcattttatactttccaatgtatctttattatttaactatagctaaattaaatattaccttttttcctttattggaatgccataaatattattcaaacatgttatctcagttttacattttcataatattaatatattagagaaaacataatctggatttatagatagcaaaagcagtaatttttaaataagacaaattgttatttttcctagtggcctactccatgttctttttctgtgcactgaaacaattatctaaattttgcaatttttttaaaagccactgctagcaagactgaatgttgtagtttatagattgtggacatatactaatgattacaaattatagctaagaaatgtgcgtgtttgataggagaattacatcatatattctgtataccaaagagtatctcatttgtctatttatacagcttatatcttgttttatacattggacaagaatataccaatagatgattggattatggaaactatcagcggtgaccggcttacccatcagatcatggatctcagccttgacacgatgtattactttcgaattcaagcacggaatgtgaaaggagtagggcccctctctgatcccatcctcttcaggactttgaaaggtttgaactatgtcccatcatctctttacttttcttggtggatggtcagaaaataactctccagtctctgttaggaaaaaaaaagtcctagacctttttaatgtttggtcaaaaatgcctatagtgggcattccaaccgaatcaatgttagtcttatactcaaagtcagcacctcaaagcaagagttattgtttttcatcacactttttatgctatcaatgccaggcagacataattgttttgactttttatttatagctatctggcattttgcattgatttcatgtatacgatttttatttgatatacagtgaatccctttgacctttttgtatataagggaataaaatggagatgaattgagttatgtatatggcataaaattgctaactttacttcctatcaataatgatcattgttctgtattaaaagaaagctttaataaggtaagtaaacaatttcagaaaatacacgtggtcagtatgttgagaacacacaaacaaaatttgaaaaaaattgatatgatgattttgatgaaagcccacaatcttgtaaaaatacatgcatatgtgtgtatgcatatatgtgtgtatatgtatatgtgtatgtatactcaattgaggacagttaatgtttgtatcgaaatcctaagttcaaatactgattatataaaatcatccttttagagtccaacaatatttttctaaaagataacatgattgcaagagtctcaattaatgatgggaaaagaatttgcatatcccatagctgatgtttatacatgtatatatactgtacagtaatcactgtcttatacaagggtaaatactttgtgtcttacatgtgtaactatagtatatctgtcttccagaaaaatgaatacatactggcaaacaattgagacattagagaccttcatgacggacatttccaccgacttctttgctgtacttaaatgagggtcttagaatagctgcatagtctgtccgtgcattaggaagatatgctaatgtatagtggacttttgaattctcatgagtaagctattcaaaagctggattttattagcagcttacctgatattttgccaaaaaggaacaagcaagcattcatcctcagcctgtgtgacgggtcctcgtgtcacactcatagttaggagggaggtgaggtagaaatgagctagtttttgcccagggttttaggacatcgtgtcaaatgcaggttttgcttcatgagcaattgaaaagcagccagtggttcatttcctagaagcacagaatataactagatgatgtttgcaaatgcctaaattttatctataggcatgtgccaaattaatttcatgctcacgatgtgtgcgagccaagagatgccagtgaaggtttacagtgatttaagaaatctgactgttttgtatggtggattgatgagtaggatatactggctcacactgatagccattctgtaggacatttaatgaaattaatatgtcatttgttactgtttacttcaacttccctaaaatcatcagtaaccattttctaaactggagacaagctcctaatttccttttataattgtctacaagatcataacgaagcatttgatctaatacactgatttgacattgtccttaatcattttgtgaataaagtttgttcacactgaaaaatgattgttttcagatctggcatattttaaattacacacacacacacacacacacacacacacacacacacacactactgtttatctttattaaaattagacaaaaatgtattttctatatgactttaaatgacaagtgttttaacaccaataaactatacatcatgaaagatttgatgtcttggtgaaccacagctacagcaaagacaaaactcaaggaatttctcaaatttaagattttcagtttcaaaagctgcttaaaagcataaggcagtgtgtgagcttgtttgacagagagaagggtatagatgttttcctgaagctgaggaaacttcctgtagtctcttagctaatgggtaaatatttcactgccaatcacaccccaggcccgtgtcgtcatatcacattcttgtgtaaagtagcatcattttgtactggagatttgagtttgtcttttgctattagtaagcagccagaggggtttaggagacttgataagtaatcattgataaattaaagaacatttctaataaggaagcatatatacatatgtgtaggatatgtctaattgggtctctgaaattttaattaaaatagtgttttaccttattttgtgaccatataaggagtttgcaaacttacccctcctttccccatgtccttcacagacttctatttataaactctcaaattgttaaagcactgcaagatgtatgtttctgagtttattatgaccagaaaaatttacagtgtgttcatctcttatattagggttcttcaaagaaataaaattaaaagagtattttatataataacatactatatgtaatatttcttatctatagtaaaatatgtgatataaacataatatcatatatatatatatatatatatatatatgtatgtatataatttattggagtgactttcaaataacggcccaactatttcaacaatagctattttctaatggaaaatcaataagccagttgtggttccatccacaaggctggaagtctcaaatggtcttcagtacatgccagaagaaacctgatgaagggatttctattcccactgaaggaatagtgagggcaaacaggcaaacagcaaatgcctccttctttcccagtttttttaatatacactgtatatagaagctatggcccagacctaaactggaacttcccacttcaaaataataagatttatagggtaggagttcccacctcaaaagattcattcaaggaaaaaaatctctcacaggtatacctagccacttggctattacttaggtccaaatataatcaagctgaaaactgagaatagcgatcacacctgtgaaacacttggaacgaaaggcactcacaagatgtataccacagaagttttctatagatggagagtgtcatttctgatgcccagaagagcagagtgctcagtgatgaattcccaataaagtatgatatatcctctgagcaccctaaattactatttgtaaatatgcctctcctccatccgaaaagaaaatatactgtagatttaaataaagtgtatacaagaagcaagtgagcttttgcatacaagtttgttaattgggtcccaaacccacaatattcaaagaaattcatgtatgcatgaaataattataatgaacatagacacacaaaggaggagattggccaaaaattccttaagacttctatgaggatcatgatagtattaatttagtatttattgtcttttgtttaaggaaatgaaatcaaatgaagtcaaaatttaagatttcaggggatgagttttcattttaaaaagaatttgtgaccagtaattattcattactcttttgcagttgtgaacaaaaaccaagagtcaactttaccaggcaggcctcagatcaaatatcacagtcattgttagtatatctcactaggttgcttaattctttaggaagtgtctagatttatagtctaagttattttcctttaatatatacacatatatgtttctatatattaaatatatataataatagctcctgcagcttatttagaataaacataaattggtagcactacccattcattttactatcaaccccattttaattaaaattgtaaaatgagtttatatttagaaagacatgacaactacattttacaaaatatttactcagcaaaaatattattttgaggggtttgccacctctgactgattatctcccccccccaaaaaaagaaaaaataattgatgacaaaattttggacatgagaagccatatttctcataaggaattctaaatggtaataatataatttattttctctcttacagtggaacaccctgacaaaatggctaatgaccaaggtacggtggcgtagtctattgttgttttctcctttagagcagttgtagctattgaaagtgtcaatcattactttgtattccccctttcacctgggccatacacctgatggagcagacactggcatgattaatcttgttaatgaagttctgcttggctgaggctgtgggtctgatagggaagatgtaaattttcttgagaggaaattgttttgtctctattctgaaggaccaattaaaatgtcaagcttctttgtatgaaataaatttttagtctctgtctgcacttctgaataattcacattaagtataattaagctcagcataattttcaagctgctcttccaccctttcctgagctgtggattaaagttctgccgtgctacataaatcacaagtgcttctctgcagtgagattcttataataaataaaaacaaagttgagttaactttttagggcattatcactattttgaatcccaaagtctttcacctcatgaatcacagatcaggtgatggtataatttaaaatattttaaaatctctctctctctctctctctctctctctctctctcattctctctcctaaaatctgattgaaaaccagcaatggcttcacacaatgaaaaatggagataaacacaaatcatccttcaaatgttgggaagaatttttctattaacataatttggagactgattgataaactagtattacattatctttacaccaaagacagctgataggattctaagcaggaaaaggagagttgttgagtttcacggggcatgagattccattcttttgctgggaggttggcagtccttgaaattccctgtgtccctgttgtgctctcaggttctacaggaattagtccctttctttgtacatcagaataggccatcatcagcaaaaccaacccactctaaggctcccaagtaagaaggtgtgagattaaagaagtgttcttcctgacagcagctctgtgtaacagatggtgaccatctgtgtgttactcttagtaatggcagaagattcccatactcacttgtgttgccacccaccccatagatcctcgttttcgtttgttttgtttttctgggttcttgtggaacatttctatttaatgtgactataatttaatatggaataatagaagggatactctagaaatgtctgtccaaagtcaagattttcataaatgagtgttgctactcctcgttgtttccattgggggagaggatttttatgagccatatctactagagatgaacagctttaattatattcatggtgataatgtcgcttagcatatttatctctaagtaaatgaaatactagagatggcaaagtagaaacccagaacaattagttagaggctctctagttatttcagttatgagataattaaaaatgcctcgtataatgttctcttctgaaaaacatttgggactcccatagaacaaatagaccaagaactcttaaattttatttgaatttggaccatatatatatatacatatatatatatatatgatacataatttttgtcatttcatatataatcatagatatatttcatatatatctatacatatatgtcatatatagtcatacaatttcatatatccgtaaatatattcatgtatatgaatatatttcattcatatatatcaaataagaaaatccatataaatttttgaataatttcactagctgttacattagccacttacatgctacagcatctcaaatctccaatcttcttagactctaacttacttgtctttctaattagtttttagttagcttttctgcttaatattattacatattttttaatttattgtgctggagatcctaggtctcatagatgctaaggacatactatccactgaagtgcacacctatttttttgcttcctattatgttaagcaatctgatacatagtttgttatttaaataaataaatgatcccccacctttcagacccgattgcctctacttgtcattaaatcttcttcagattttgtcaaaatcaatgagattaagtcatttgctaaaagtgaagtgacctcaagttttattaccccggtagggtccaagaaataaaatatacttattcacatgtttttttttacccattaaatattacttagaaatattcttctacatatgctatttggtgcctttttcaaacacagtcaacatgaacagctcaacattttatgtcactttcattcaagtcactcattaaactgaaagggttggtgaagttaagttagtgatggcaatatcttcagatttttacaaagacagcacataaaatgtgttggccacgcaaagcttgttataaacaacatcagtcacttgtgttgatgactaagcacttgagaaatattacagattgcagaacattaagcctgttggaagtaatgatagaaaggggtctaaatgttcccattctaggcaaggagcaaatgagttgaatagttttcatcttacacactgatatacttctgtccctgttaaatatgtaagagggagtgaatttttgatgagataaaatactaagccagtctacattctcgcatggagtttagaggggcttacgcctctcccaactgaggagctatggctggctactagaggaggaagagtccgttctatttaagagtgtggcccttggtacgggaaccacactgtagtgggtggtactgtatacatgagtatatgggcaacaaaaattgtaattggtggattattttaaaaagtaaaagactagacattggtctagtgaagcagtggacattggtttggagcagttagggagagaaggaggaggttagtaaggtaaaatacatatgaaatcatcaaaaaaaaatcctcactcttagagaaaattgggtagtttaaatcaggatggccctggcaataatagtcctaaattgaaaagccggagattgatttgtagaagaaaacataagaaaagtttttgattgttgttaaaaacacctttggcagtttcttgtcacaattacttgttcttggaacttaagacatgttatggagaacataaggggaaaaaaaaggttttcaagaataagaatgagttttctggggtaaggagagtggatttcttcaaagtaatagtaagagtttgacataacactaagacttgtatgacgattccacacatcatacaattctcaatccttgtgcaccagtagattaaatgcagtgttttcttcagtttaatcttgatctgctgtgtaattcccgtctgtactcctcccttgattcattttctaattatttccagggattttctatgttcaagtgaccaatgttattgaccgtgactctgagttaagtttcatggagagagaaagggaggtggtgacagagattccataaagtgtgtgcccaggatagacaagagccctatcacatctctacgtgggtgtgtggaatgcttaattaaactccatgaagcctttccaacaggaacaattttaagaatggatggttgattcatttaattctcgtaacactgctgagactgatactattattatctccagttcagcaataaataatctgaagcttagaaagatgctaaataatttgcctgtagaaacacagctactgagtaggaaggacaagttgcgaaccccaaaaaatgatgtttcataaaccctgtttttaagccaaaacccaacgaaagtatgcactttcctcctgcttgcatgaaagacccataaacatgcggatctactggtaattttttttaatatggtccttcctttttatatatccatgagtattcttagatacaaagcaaatgactttccaactaataatcttgttaatgaaacactgggattatgctaattctactaagtaggttatctagggctgccagtaccaaatgttgggtaagttaaacaggaaaattatctgtcccttagagttgaggtagaagccccaggtgattgtctagaacccctgagtcctgacagtgttcatgcttgcaaggcaagcagaagggatatagaagccataccgcagcagctctgtgtgtgtgtgtgtgtgtgtgtgtgtgtgtgtgtgtgtgtaaaaggctacatactcacaaaaaactagtactcatattgaaacagcaatttaattcactcctttgctaattatctttctagttcatagaccaagaaaataagtcttttgccccaatccacacagatcatttttgacaatagtagaagccaaatgcttctctctgactccacaatgtccagcttattgctgctaaaagcatggaaattttatttttctgaaataagattaaaccttagagcttcatatggataatacttttaaggatttcacttcccatttccaagagtgactccaaatctgtgcttcctatgtataaaaaagtttgcatgggctggacctaggccccctatacatatgtagcagcttgttcttcatatgggtcccctaaaaattaaagtagggacggtctctgactctgttgcttgcctctggattcatttcccattgctgggatgtgttgcctgcctttagtgggaggcaatgcacctagcccaggtaaaacttggtgcttcagtatcaatcatgggatgcagactctctcagatactttctgcttggctgagtttctggccttctattattcttgttggagttcatcaaaagaccttcactcacaaaggccacagagactgccatcattgcaaaccacatgaggatttttattgatccaatatgttggggactcccctctcagcacgaaagccagaggagagacccagaacaaagaaagaacacactttttatatctttgtaaggggcagatttgagcaacagagtgtaggaagtaaccctttcaggcactggttggtttgtatagtgactaagtaaccctttggtctagtgactctctttgcctgcccctcccatggtgggtttttatgatttggtcagcaaaccaatattacattttgaatttttttattaggtattttccccgtttacattttcaatgctatcccaaaggtcccccatacccacctccccaatcccctacccacccactccccctttttggccctggcgttcccctgtactggggcatataaagtttgcaagttcaatgggcctctctttgcagtgatggctgactaggccatcttttgatacatatgcagctagagagaagagctccggggtactggttagttcatatttttgttccacctatagggttgcagttccctttagctccttgggtaatttctctagctcctccattgggggccgtgtgacccatccaatagctgactgtgatcatccacttctgtgtttgctaggccccggcatagtctcataagagagagctatatctgggtcctttcagcaaaatcttgctagtgtatgcaatggtgtcagcatttggaagctgattataggatggatccctgcatatggcaatcactagatggtccatcctttcgtcacagctccaaattttgtctctgtaactccttccatgggtgttttgttcccatttctaagaaagggtaaagtgtccacactttggacttcgttcttcttgaatttcatgcgtttggcaagttgtatcttatatcttgggtatcctaagtttctgggctaatatccacttatcagtgagtacatattgtgcgagttcctttgtgattgggttacctcactcaggatgataccctccaggtccatccatttgcctaggaatttcataaattcatttttttaaatacattttgaatttatgtgtcagtaattaacgtcaccgcttttaaaatcacagggaatcctagcaaggtcagggtggtttgtggtctttctcagaattcagtatggcgttgggggcaggaaaattcttctgagaaccattatttttgttatggttagttctctgagaacagctaatattattttggcagcggtaggcttaatcattttgacctctaaaactatgtttttacttttgtttagtcagccagcttccttacctggctctgcacttgacctgttaatacagtttggaaagttctttttgaaaggggaaggtactgggtagtcttgaattcattttggatattacattctcaaggataatagacatgatggcaacatgtctacaggatgcatagggaaacagtgagataacgtttgagagccagaactgtgaataggctaggcagaagctctgcaactaagatgcgctctgaggctttaggtcatgtttataaagaacagggcttatttgctttgctgatggttgaagtttgggtttttgtttgtttgtttgtttggttggttggttggctttttaataaaagaaaataactagatggaaaaaaattaaaataaaaattggtctgattatgatttcagtgtatgcccatgcctaagcagtgcgatgacagaatggcaggctaaggtagatgccagggtagaatggcaagaccaacgtgacttacagtggatagagacttacctaagtggattacaaagaaagtgctcattcctggaactttcaagtgtctctaattctctgtggtctgggagaggattagcctgagacactcagtccagagaaataagatttggaagttagttttcagattcagataaagaagaaccatctgaacccgagtttcagtttaaggaaaggcggacgagatcctcagaattttaacaattattgataagtctcctggcttcgcccatcagtagtcactcactgtgtgctctgagattggaatcgaatcggagcccttaaattgcagcccagccctaacattgggacctgctgcgtgactgtggtgatgagaattatcttttctcagcatctccatctgaaaaatggtgtcttgcaaattatctttaagattcctatgtttttgtacggatactagaatttttaaaagaacttgactataacaattttgcataacaaaaaattatgaatagcttttccatgtgttctcatggcagctttatagttagaaaaaaatcatagaaggaggacctaagtcttaatcaaatgttcacggggtataactagttagataagaatgcatgcccaacctacctaggactctttgcttaacaccactgtgtaatttatggaaatacaatcaaatgcattgaatctaactttgctatcaagaacattaaaccttgtgacaatactgtaatttcatctcctttaaaagactcagtttccctcaataggagtattcttgtaacgttcttgataccacccctgccattttgcaccttggctgtctgaatctcatggattaaacagagatttaattgtttcaaatttcaggcaactaggattatcaaggtaatgtagtcaagcttgatattagttaatataatacaggcttggtagggttcagactataacagccaagcttctgtttgaaaaattgaaacctttcacaccttctgatgggagcagtctaattgaaaattaaagcctctttctgccttattgttgtgaatagcttcgacccagtttattattcaaccacttgctacacccacttgagaatgctattctcacctgtgtttttcccaggttcaaaatttggcaattctgtaaattatgagtggcgaagaagagaaggtggaaaatgagtaatgtgcttttaatagagtgttaagtgcttgtcatgttcccagcaagcaatcaagtagctgcctaagtcagcctctcaggagtttttatgttctaatagggaactttgaaagactgaaacatactcagcacccatagggatgtattaaaaccatgtagatttttttaccctctcagactgctaggcaggcccttttgtttacaggatctcaaagactgattcctgcataggatcctctaatgatacctactgtaccactaactcccatggttcttcttgaaaggtctcttcctggctctgactgcctgcttctatcagtcctgcattatgcatctttgggtggaattgtttgctttcttaccaaaagaatctttgtatttagattttaatttttaaattgtagttatatttctcctttctctttctttcttccacaccgcataaacccctccctccacttgcattcaaattcctaagctcaatttttcattatttttcattgcatgcagatgtttacatgtctatacatacacattcctaaatataatgtgttcagtctgtatgatgtcccctgtatgtgtgtttccagggaagactcttagcaacagggaaatcacttgatgtgctcttcactggggaagaccactctccacctcccaactctccccgtttgcccaattctttgtggacagttgaggccttgtgggctctttcccatccaagctgaaatgtgcattgttgctatccttgttctccttgttcagctcatgattgactgggaagccatgtttgcaaaactttatggatatagtctgatgttacaaatagacacagtctaacaacaaactctcttttcccttggctctgataatctttcccctctttagcagtgttctcttagccttggattcaggagtgttttctagatgtatgactgggactgggctccaaagatcaccattttgatgggctgtagttttctgtagttgtcgttgtgtactataaagggaatatttcttcatgagggatgaagactatacttattggtgtgtgtaagaacaaatgtttgtaaattcattgactgtttcagtaaactcagtcatttttccttacgatgctgaccaagaattgtattttctaacctgatgaacatactattcctccatatagactaaagtcaggtcataagatccaacagccacaaggtatttactgtacctgattctgttctctcaacctgagcaatacttcctatttctcaaaaaagttaatccaagttcctcttccttccagacttaccccccatatctactatattccaatatctttcattgccgtttgccttttcttcttgttgatgtctagaatacacaacttatattgcctatttctaataattttctattgctattcctagcttagtgatcagattatgaattctccttatgtagaagattatctagatttgtattgtcatctctacccgttattatagtaattagtattatagttattaaatgtattttgagttaaataatgacacgagagtctatgtaagttgagtcatctagaaaataaaaggtttcctatctaacaaaaagtgcagattggaaaacctatcaatagaagatatggtctcagatagaagataaataaaatgtaagagtatatgtacagataaaaaccataaattcaacaataacctggggaaacaatcaatataaagtaaaaataaattatagtcacctttgaaagattctaagattctaattgcagtcacctttgtttctttgacatctctcattccttatttgttgtgatcacaaaagtgaaattataaacttgaatttcactagctttttacaatgctgaatagaaaaaaaatcaaaacggatgggaaccaaagaattactgaaattgtggtaatgcactgtgagaagaactggactcactaatggtaatggagctgggttgatactaggaacggaaacacaccagaagcaaaggttatgcagaccattttcaaacagtctgtgttatgtagctttcacttcctgaccaaagtgaaaacatgcaaatcatgtgctctcattaaaacagatactacagcatttcagatgggaaaacatagatagctcaagtaaagaagaaggtttcttaaaacctagactggactctaagttattaatagaactttaatgcaaaactattagtagagttctgctcaaggaaatctcatgaagagatagttagaaaaccagaagatgggaaaattacaaaaactgtaagataggttcgggctacaactaaggaacactgcagaggagtgtattgtggcagatagatggacttgtgaaaaggcttttctaatttctctctaacatagtagctgtattagtcagggttctctagagtcacagaacatatgggtagtctctatattgtaagggaatttattgatgacttacagtctgcagtccaactcccaacaatggtcagcagcatctgtgaatggaagtccaaggatctagcagttgttcagtcccacaaggcaagcaggcaaatattcttccaatgtccttatgtccaatgtccttatatctccagcagaaggtgtagcccagattaaaggtgtgtgccaccaagcctttaatcccatatgaccttgaactcagagatctccctgtcttagttgtgtagaattcatagccactgtgcctcaagatatacatgccaagatccaggtcagaaacttctatctcccagcctccagattaggatcactggtgagccttccaattctggattgtagttcattctagatatactcaagttgataaccagggatagccactacagtagttctaaattgttccttcttttcaacacttcaaagaccactgtattaggccctacagtctgtatgctccttgggtccactgttatataaacctccctcacatttgaccagtcatgctgagcagttcttgcttgagagaaggacaggaggaagaaaagattatctgatgtaggaagtagccttagtgtcaatgaggtactctatcttcaaagtctagtttttccttttctaacgtcatgttatacagtcattccattgtttttgtttgattgtcttcaaatttatgtctggggcacaggataatcaaaacatgttgaggattcataattttcctgcctcacattctcctttgctggcagcacaggttgtgctacaatgctagcctcagttatggcctttctcaggggacaggatcacttttgcagtgctttgtatgactgcaaacattatttctttttccttgcaaagcctaccttgtttgatatgtactataggaatatgggtgatgtatttaatatcacagattcttaagtgctcctatagccacaggattaactcttcagtgtgatctagttcattttcctccttcttcatttgttcctgtaattattaatgtaccattgaaaacccatgcttggatttaggcagactcggctccttaagaatgtgctcctgagtaaattcatctttctaagccataatctactcatatacgaaatggtctgttttacagatccgttgctaacattattctcaccctacttactgaaacagcttctttaaatctcttcatacttaattagcataatctttctcaaatagataggatgtgtgcaaaattccctaagtggatctctgtctcccccaaagtaaactctaaggaaacttttagatacagtatataaggactaattttctataactttcaaaaactcagctaattaatcaatctctctctctctctcttctctatctgtgccctctgaaaactctcccaccatatttctggtgttaagtatctagtaatccccttgtcccattatgatagcttactttaaaattagggtttattttaacttttggaaatgataaaggggttacaatcactcaatttaactgttccctttgcagtaatgtatccatgtgtacaatagacactgtagtctctaatgcttccatcagaagatgctcttgttgatgggcagacttttcccagtgtgatctctctctctctctctctctctctcacacacacacacacacacacacacacacacacatccctattcacctttgttaatgagttcagggcagataaaaaatgcagaaattcccaaagggtgaaccaatgagttttcctggaattacctgcaagaataagggtgatgtagttacaggagcagaaatgactcaaaggcagtgtgacattatcaaagcccaccatggcatgggggcggggggcatatcacaaaagctgagaacgtggagcacacctcacagcctgccatcagcttgacaggtggcagagtgccctttccaggcagctcagcttgtcttcatttcatgtaggcagtttgggtgctctctgctacgttctggctgaggattgggtgatgggattcttgactcagagtctcatttgtactctggccatctcagggtgattctcagcagtcttttctgcttatatagtcttgagaatggaggagtctatgaatctgatctatttcagggacttgctgaagttattttaagttgtgtactacctgtcttaagtagctttgatccagaatagagggttttcctctcaaagaaaaccagtacacaacactctaccccttcattagactcctcatttgttctagtcctgtttcctgatgctctctaagccttgccacagcactaacgccttgttctcaggcacttcaacagtggttataagttgaggctgacaacagtagttagtcatctatgggcaaaagcacacatacatgttgaaagggcagcttccattgtgatcaaaaattcgagaaccacagcttactcgtaggaatctcaggctgcatcactccaatacccactagtagtaacttctagcatttcaggatctagctcacagtgaagaggcacttcaaaccagtcctgcctttatttctccaagttctgaaagcaacatgtatatatgatcttcagcaatagggtccattcattcagttgtgtaatgcaactaacaactgtggcaatagctttatcttttggaggcctctgacacctccttagccaaaactcagagaggtaactgacctttggcgctgtatgtcttgaccatgttaatgaccctgaaaacatctttttttctttattcttcaaggtgttcttgcatgtgtcttaaacaagactctaggtctgcaaaaatatttatgagtcagtgtcttattatctatataatatttttttccaaaggatgagcagggcaaggtgacatctttaaccttcatcctataacaaatagtgggcttataaagaaaatcttaatccattgtcatccattctgagcaagtttaatgtgattcttgcagatcacaacaaagaagatactggaatcaaacataaacaagatctaatacagtgtggaaaagttggtcaattatattcttttgcttattccacaatcttgggtataatagcagaatagtttgtctcacttagttatctcaccacagtcctctgccattccgaactctaagccattcttcctccatactttagaactctacctcagggcttcttctttggatttctcctccattgatgaactcattggatctgtctcaaacttattatccctacccagacccaggggtgggtgagccagagggaggcatggtcctgttttccactcctgcacctctgggccccctgagaatgagaagacctggattggaatggttgcataatttaaagctgttacttctctatatgccacacctggctgctgaaagtagccctggatcaaccaactctctctactgctcgcatgccatttttctagagggaactgtggctataagaagtctatgggaataattacccaccgctggtagaagtttgaaagtcttctgtcatggttgccttctctgaccttttcctcatactttaaacgttacagccttccatacctccttagcagagactgggcttgctgtcatttgtgttaattaggaaatatgactctacaccaatcttgccacacttgtcttcaagatgtgcagacaggccattcctttcttttttgttttgtttcagtttggtttggtttggttttgggtttttttgtttgtttgttggttggttggttggttggttggtttgtgttttgtattaggaaatctcctctaggttgctctctcccggcacaaacactctttccatggtagttaagtcccttccatctgccaaagcatttctttgtttacaaagatctggccccacccactatggaaaatggaaaggtccatgcctgtcttgaggtttctgatgagtcaaccttttctttaactcctttgtgaacatagttctatctgacccaatgcagtgagactaaccatggcttcattctctcactagtgcctgtccctgctttgtacttatgaggacagacagaggtaatcaagtcttcctactggctctgaaaaaccaatatatcagtggctgatatatatatttttttttctcatgctgtcttagtttatggatcctttgccttaaacaggaagggtaggaagctattttgtgttgtatactttttgtcttgaggagttcctgtacagtactgaatgtttgaatatcaaaagaaactatttcacagcacgactgaaactcctattgaatgcatgggtggaatacgagaagatatgtgggggaagaaactccaacagactcattatttatatccactggcaggatgtgcatgctttaacgtcttcattcagctgttttcccttaaagaagaatgaaccccatctctactcagtgtaacttagagtttcacccaaacacaagcacatttcaagtccatgtttgggataatctcatatagtactctgaggagaggctctcagagtcattctatggactttgagagcagtttctattttatgaactacatagggctatggctcatcttccgcagtatcagtgcctggtaaatgagctcctggaagattctgtcactcaggaaagcccttatatattataaaacggaatgatgctttagaatttggtaaagacggggctgcatctgaaagtgatttctgggagtcttctgatggctattatatcagattgctagagacagaggggcataaacccagtgagataaacagctccagacagtaccaccaaagtccatgccagtagcattgagttggcctctgttctgttaacaactgaattgttaatcactgctgcatctaaatttatgttagtaataattacaagtaacgaagtgctggcattttgaaatatggcttgttatgatataggttataaggtagcaagccttcctcaggaaccagtcaggtagatggactcatgaggtttataaaattaagaaattatgacttttgtttacttggtatcttttaaggagaaacttaccttcttggctggggtcaaaatatatatttgtttgattggattctttggttaattttaaattacggctcacttttctttgttcaatgtcaagagtgaagctaagaagtgatagaatgtttatatatacatgcatgaatatttacattatggcttataaattatacacactatatatattctaattttatatatataataggggtggatgcattatttgtaaactttttttcttacctttgtcagtttctcaggaaaccatatcccatgtgttggtcaggatatctatactcagaattaaattgagatgtctacctaaaacaagtgtttaggataaaggaatggtccatataaattcctcaagtacacatggcatgactaacaaataccacagagttccccattccttttccttcacattcatgcatgagattctaaccctaatttttagtttgatttgtcttcttcttagtaagagtcaactccattcacaggaaaggctatagagacaataattagagtagacaatgatgatcttttaggattaacagggacaaagagggatacacacagtgttctcactctaggcaactcagagttgtttaccaaaccctccctactttgcaaattattgctcttagagtgtgtacaggaggcacatgcaactaaagcttttgcagaaggaaacacaccagggtttattcaacaccagacctcacatgtgctgagaacattggctgctgctgctgcttctgcacctggagctgttatgttttccttcacttgataataatttttttaatgtttattcaaacacagtgcattagaccttaggaaagaatgagcagctgctttctattaatatgtatttgagaactcttgggcgtcagttattgttctgtttcctggtttttgatgccctgatatctttgctcaaagtcagcagaattatcacctgcatgataaattgatccctcacacacacacatatctcgcctaagacaaatcatctgttttaaatatatctcaatgtgatctgtgtgttgggcagtaaaattgtattcaggtggcattaatggatcttctttatccactgttgtacaagacataaaatcgatgcaattttcgtcattaccccccagaattattctcagaaaaccaattctaagatcaagaagatagctccgtgctctgcattcttgggaggactgtgcagtaaatatttgtcaggagacctgtctgcccattgatttagattatggtccatatgtatttctgtggggacagatagtgtagaccttctgaatgcccattcaggaaagatggatttgagatgagattacagcttccacatccaacttcctaaatgtcctctgcacactaatgtcctactctccttcctgaatctggaaaaaaaaaagaggagactctagcaccaaaacacaacatgattcatcttctctaggtgccaaaagttgttgtacatagaaaatactttctatgcagctgtgaaggacatcaaataaacattaatataacttaattttacacacacacacacacacacacacacacacccacatatgcacatacaaagactataccacagtaaaaataaagaaacactattttaattgtcctctgacaacaaaatcataatgaaaaactgaaaaaatacaataaattcaaatgcatagtatttagtgattcactgaacagcatcttcattggcaggagtcactcctccagtattgagagctcatcacaggtaccactgacattagcatcaaggacaaacgaatctgcatactccctaaagacagccataacatgtttgtctttctcaacttcattcctgggagcaaatgacagggaagtcacagacaattgagcttattttcaaattcactctgaaagactcacaaactatcaacctttgaagatttagtttattacatctaaataatttgaggattctaatttttcaattatcaaagatcttaatgcaacactgataaaatatcacattttttttttgcaggtacatttttaggaaaatctaacagtgttgtatagaaatagacgaatgaagttgtgcttaaatcattaaactgagagtgaattacaaaccatgaataggattatttaagctttagatataatgaaccaatgctagctgtcatcactgggcacaatgttaataaatctttttatacactccccctttcctgaggattgaggcctatgccttttgtgtagcaagcattcaagaaatgttgaatgagttataaccatttaattctcctctaatgaaactgaggcctttgggatagggcagtcatttgaatatttacattgactgtccttcacttcaaccatgttcaaaattccaatcactcctctatttctgtaagccaatgctcgagaaatcaaccaagtttactgagcacattaaatatcattccacagcagtaagtcctcaaacttgtgtcgacctgcctggtagcagcagtgctcactaatggttcccttagctctctagcatcttttcatttggtaacatcatggcactgacctaacagtggtacaggcatattttgttgttgctgctatcaatattagtagtaattctttatgacttactcatcaggaaagcctccctggaatttaaaaggaatctttcagagagaggaaacagcacacaattaaagcttgtcttcagctcaagttatcttagagtcgtcatcaatatcctgaaaatgagtttttttgttttcctgatgaactgcaatatataaattaccattaatccaatcttcctcattgattatgtcacatttcctaaacgacactttctgttggattcattaagagttaattttatcttttcatatcaatctagtaaaaaaacaatgaaaagctagccatgacaacatatgagattttatggataaaatgcccaagttttaagccacatactatttagaagcacttccatggtgcctttatcctgtataaggatctagtctataggatcacagaggtattttcttcttaatgtagtttcgatgtaaattcgaagggttccagacccatagagcttcctgtctgagtaatacatgcacatgcttgtggatgtgtttttataccctaccacaaactagcaaggagctagaaacttcattaaaaaggcatttgtcaggaagctggaggaagggaaatccttcccaggctagctacctaatttctagccaatataggattactccctctacaggagtcatttattgccgttactggcctaagtgattaggtggttaggatgtcttttggctgactgctttgcaatctagctgctttcagttgctgcacaagtatccttaatattcatacagaaccttctgttccacttcgtttcattccacattgatcgcacagtgtgctatgggcaaagcttctctgagttccttgaaactttagatgtgttggttacataagccatatatctgggggaaaggtaggactgtccactgatgtacttagcctaccacaatgtgcacaacttcttctcattgaaactgttctttttacaagcatacctcccaacatccctaccacatacatcaacttctccctaatctctccttcctttcacactcgctgtcagacccagcagagtttaaatatgccattttatgtgaaaagcatgattcgctgtgattgtattaatatctctccttgcctattggaagcctggtgtccatactaacttcagctgagaattgctatccaaagaattttaaaaattgtgctcagggaatcagtgaacagaatactaagttgcttctccacagatcttttgcaaataaaataatgatatgcttgggtaacactagtgagaagaatttggggtatgcaaaggaatgtcccaaggctgacttgtaagtcagaaggaggaggaaacatgtaatcctttaatggacaaccccccccccaaaatcacgtacttcatggccaaccacttaccattgtcctaaaaggaaatacttgaagaacaaatcctgtatggggacatctttgcatggaaagtcaggtctttaatgttttgacatgagtgatccacgtagatattccaaaggtaaaagcaatcattagaattctctacatttatgaatagaataaaagatcatctgttatacagcatccttattaacttcttattatcatataattattttcgatcaatttgtgacttggttcttttaaaccctacattcacatccactttacacctatgggaggcacaagtcccaataatactataacgaaggtgccttctttctttttctctatgatagcaacagatacgtagattatgtgcctagagatcttgatgacattctttgttctctgtacagttcgtatttattctcaagcatcttacttggcagcaagtactcaaagccaaatatcaaatgaaacaagtcttggcctggggagtcatcaatggggacttgctaaaaatctatgacaggcaggagacaataaaggctggctggacctaggaggcatgacttagatcatgtttgttctgaagactttaagagaaaaccatttagtgtggctatgacatgtcttttgtatttatttctggatactttatttgagagagagagagagagagagagagagagagagagagagagactgcttcacagaaaggagttgattttaactgtattaattataaaagacttttttacaccctggaaaaatgaaattcatagaagcagcctaaataattcttctctatagtgtatgtttagaattcttttctatgtatttttattttgtttttgttttgttttgtattgttttgttttgatttttggtagttccctggactatattcactgacattccaatgtgtcaatctacacaggtcgtcatggagatgggggttattggccagttgatactaacttgattgatagaagcactctcaacggtaagtatatgaattgagttctattggattagatatactaattacatggttaattctacagtatccacaacaaattttctgttgacaagggcaagaactgtggacttagggtttcactgtggttatagaaaaaatgatattattagcgaacttcacacattctatcagaaaatgatgacaattagagatgacagatgcatggaaaaataattagaaaagttccagcactgggaaatttataaatgatacaggtcttccctagtttgttttctaatatgcagaaaaaatattgagcaaaacaatttgtagaggaaagtttttgtttcagtttacagcttatagtctatcatggagggatttcagggctggagctctaggaaggaccctggagtcaggaactgaagcagagaccaaggagaaaagattcttactgatttactctatgggttgctgggcctgctttcttatgcagcccaaaaccatttgtccaggaatgactgcacacattgtgggctgcaacatcaatcattaatcaagaaaaccacccacaaaattgcctttagcccagtctaatgaaggaattttatcaattaaggttccctctcctaagatgatcataatttgtgccaagttggccaaaagctaaccaacacaagatttattaaatacttagattttgaaatgtggtactgtatttcaaatgttcacaacaaccattttattggagagagactaaggattaaatttggaaccaactatttttgataaatttgctgggacttctcactcaaaaagtacatttataaacaaaacattatagtattttatttttagtttccctttgtactctccagtttagacatctctcttgcttcctctagcaaagcttctccatataactctgggcttttaggatgacaacctggaggaaatcccaggtaacgaacatggaacagactgaaagccacactccacagcttcgctcagtttgttgaagcagagtctttgagaggataaactaaatgtatccaaaggaccaatctgtcatgcttatcattggaatacactctgatcttgtttggtttgacctactaagaagaaatcagatagtcaaggagctataacatttgttattgcacatcaaaatgtagcaagctctaagttgtttcagtttcatcacacagttgaaacctcctggatgactgtgcttcactgcttgcttgtcacttctctgatgcactctcaacttgatgtttcctacacacgactctgtaaagaaatagcattattttacatactaatggaaaataccaattactctttaaatcctctttggatcatgctataatttgtcttacccccccccaaatttcttaagatttgaccatatgcttagaatacttctcactcatttctcttcactgctatgcggtattttattttataactaatgcaattgtttaaccaccttagtagatttgcataagggatttgattaatgaacagatacatttccatttgtatagttttctatcaaaagacacagatgggtgacaaatttgttatttaatttgtttgctggttgggaaatgagaataaatagttaaattaagtgatggttttctattgtatagtataaacaaatgcatcaatttctccaagtgttatagtaccttaataattttcaatctcacactataacttcctctgctattaatgccctttacttaaatataggtaaatacatttaattctatttacattttccagccatccctctcatcacagaatactttatattgggtacttgtaaactacaggaatttgttgcccatagttcttctgaaggctgcaaagacagtacaaggtcaagttctcagtaggttgcatttgctttacatattgcatgttctgtgtcctccttggtagaaatggtacctggacttctcctgtgaggacacagattgagttcatgtaaagtctgtgtacattacatagccatgcgcaaaattcgtatagtggaatctcacccagggcactattaggtttcaatatttgcactagcttggggtgtcatgatattcggaccttaaaggacatgcttgaactatatgttcaagtcaaatctaaggttcaatacaaaatgctttttccaggaggtccatattgtcctgttctttcttacatgttctctccctcatttctgtaatgattgataaagtcaatacccagctcaggaaagctcttgtaagtaaaagactagaactcacagtgctaatgtgaaaggctatattggaactgaaaccaaaccggtgtcttcccctgtgcaataaacttggctaatgatcattctgtccaccaaatgttgctagtttcattaacttaattccatttgaagtttgtcttaaacaataacagtacaccagacacactccctatacttaaaaacagcccagaaatgttactaatgatctaaagaaatggcaagtggtgaagaacacttgctgttcttgtagacagtcaaggttaattccaaacatacatatgacaattcccaactgtttgatagttccagtttgataggatcctataccatctcatagccttcttgggcactacacacatgtggtgcacaaacctgtatgtatgtgccataacatacagaaaatacaaataaatgttgttgtaaaggaaaaagggatactaagactcctctgagtgtagggttctagtaataaactatggatacagatataacaaaaattaagatgaagaattattcaggtagattaaactaccaaggtgaattggtgaaaaaaattcatggatacacagaattttttaaggttgctttaattaatttgttatatagcaactatatatttcatatatcacatatcatataccatatattatacatcatacatgatatatgtcatgcatcatgcttcatacatcatcatacattacacattatatatcatatataagtcaaatcatgtcatatgatgccatatgccatatgtcatatattatatatcatttttgatagagaaattatagttctagagtccacataaggaataaaaatctcccccttggaatcattccaaagagccagcaagatgcctcagtattttaaggtacttgacacaaatattgaggacctgagttagctatctggactacatagataaaagaaagaaatgatacccatggctggttctctgacctaaaacatttattctctcctcccctacctacctacctacctacctacctacctacacatacacacacacgctctctctctctctctttctctctcacatgtgtgtatatatgaatacatacatctaatctacacttacatttaaacatagtagtaaattttagagtcgtcctaaattaccaattttgatatattatattagttttatgaagttgtttgagtaggaattcatcacccatcataattatgacaagtaataatgttttgaagcagataataccagaaaattaaaaaagcaatctgtatggataatggtgaaagagtaaagatcccctcctatctttcagtattgctaagcagtgggtataaatgttaatggcggaataagtgtaagccagaggcaaagttttgttgtctctgaagtgacatgtcctgaaggatccagtcttaaacagtattagatttagcaagtaaaattgtaatttgttcacaattgctaaaaatctgacagaagtaattctttgcaagagacttctgtttcaatgtgtttatgcttctgaacgtatatgcatatgcaatgagaaattattcagaattatcctaagctgcttgaattttcacttcttaaatatgtcactccccagagtgcatcaagcttaaaagttttgcttaagtgcttaaagttctcattcaaaataaaatgaaattttggttaaaaagaagtgccaaactacatctaccatgagcctgccaatcaatcaactctcatgttagaggagtcagtctgcagctgaagaatagaaccatgatttcaaatgcatgccagtacatgcttctctttttaaggtttacgactcctagtaagaataaaaattgtaattaaatttgatctagcaaacattacctcacagagaaaattcatgaaggcaaaccagataatgatgtccagtggtttccagccagttcatattaactcttggcattattcttctcagtgttctccatcacttcaggatgttttagaaatattatgctaaatgaatgagactagtgatgtacgtgcaatatgtctagagtaaataaatacctgaggaacaaattgttactctgactgattgcagcaaactgaaaaccccaagacacatggaaggtgaaatgaaaacctattctctttcctcttctattttgctagcagaagaattatggtaaaaatgtgatctgacacaagccctagctattataaacaatcccataaagacatatgaaacttgaggttcccagttaaaagcctaggaaagtgttgcagtttgggaaaaacggtcttcttttttttttttacccattttgatatgtaagtgaggtccttaagaggcaagtctgcagtcacaccttacccttaaaagatgtctgcattgacaaaaaatttcttcccatgttttgttctgaaacttctcacataatgaaattgcatacatctctcttagactgacagaattatcggtgttttctgtctctctctacatttgctgggctcatccttcaaagcttagtattagaataatagcttattgtcaggatgcaattggcagttgcaaataaatttaggccctggtaaccatttatgttctttgtttttcattctacccctttaaaaattcacctttgcattagtgtgtgtgtgtgtgtgtgtgtgtgtgtgtgtgtgtgtgagagagagagagagagagagagagagagggagagagaatgtgagaatgctataattcatgaattctctttagttgagagcccttaatgaaattgtagaagctgaagtggcttcctaaatatattcttatgtcaggaagaatcagagctaaatatttggtgacatagtactatttcaattttatgacgcatttaatttttagactagactccacatcctcccttgacactgatcatgtttctacttctcaaggcacagcctgtaccttacattcatgtgaatggcaactaccatgaatggtacctcagctcaaccctgctttattcaccaggaaatacctggtctgcctgggacttgcaaaaacaagttcagcaaatttgatcaaaagatctatagatcctatagggttttctttcattgaccaggtttgaaacaatgttaaacttgccatgttttaccattttgattccttctctttaataaaaatgtaaaattaccaattaattttaaatactcagaattgttggatattcttttattttcttttaaatttatgtatatgggatatgagatgaaagattgtttcttggatctatgtaatttatttcaaggaactatttttctcagcatgcaagtaatcacatttcaattcctcaaaataatgggatataaagtcctatatgttgctgtaaactgactattctgagattggtaaattattagtagaaattcaatgttcttatcagataatgggaagatgcaacagtgctttccagatacaacatgattgatacccacataaacttagagactccagcacacacacaagttcaacaaaacaaaatcccagaactgagaaacagcaatgcacaccaactcttacctttaaccaagaagctatttgcagttgatacctgctgtcagagtttaaatcagttttctccatcagaatgtcactgagaatataaaccatactccagggcagacaccatgaccaggagtagctgaccaacacaaaacagactcaatgaaaaaggttttctcaatattatattcttagcttgttgataaggataaaactcttctataaattcatctttggagaggttccatgttggatgcttttagtgtagtcaacagggtacactactataatcagtctctaaattagaagatttctatgaactgaaaaggaagttgaaaaccattattggcccttcccattgggccatctctccatccatcagctaacactaaaatacattctacttctattgattttcctactctacatattttataaaagcaaactgaaactcttatccaacctttagttgccttcccttagcttctatgttatgacatggctccatttttttgtgtcgctgggtagtattctattaaaaggatataacaccatttttttaagtttatcaacatttacattgtttctaatttggttatgctgaatagtgccattaataaaaatttcctgtgcaagcttttatatttcctttcacttgaatcattttgtttctgttctcaagctataacggtaagaactcttccccttgttacagtttgatgagtagtagtgacaacctctccttaaacatgaaccctgtatacttgttttatccccagaaccacccattggacagatgcaccccccgcatggcagtgtcactcctcagaagaacagcaacctgcttgtaataaccgtggtcaccgttggtgttctcactgtgttggtcgtggtgattgtagcagtgatttgcacccggcgttcttcagcgcagcagaggaagtgagtagcgactgactcccaagagaaagagtttcctatgctgtatattttctctctctctctctctctctctctctctctctctctctatctctctctttctccctctgagtgtgtgtgtgcacacacgcgtgtgtgttcttttctttcataattctcatgtgtcccttactgtttgaccctagttaaacccatttctgtctattgtaagcatataattaagttacagctagacttacagattttacaacccaaccctggagactatcttttatttctgtttgattttacttcttgggggcaaattttcatgtaaatagcatccagagagggactacacttagccccctttttaccccctctaccatggctttgagacagttggagatattgttcttccacaatacttatttatcacatttgacagggaagcctgcaggcagataatcaatgcttgttgaatggatgactaaatatagcatatcaaattcaatgtcattgcaagcatagggatgcttagctcttaagcactaggaaagaaaaagtccagtagtttgaaaaggttgctatttcctgtccatgtttaaatgtcagaaaataacataatggctccaaaatatttttcatattttagggttgttgattttactgtattgagaaggttgcatcacgcacaaagttaagaatgaatatatatggtttggtcacaactcaccctttccaccaatgcctcgggtccaccacaatgtttgcctgtttttgcagattccggaaatcaccagtcattgacattggtcagttgactgtctggtttttgtcaaatccagtctgatattttcagcaacactcatgctatctctggatggactgtcttttgttccctttccttttggttggttctcagcctcaggcatgtagtaaggctgggatggaagtggctggcttgacatctcttctctacatttatttcttctctatatttattgtcaacaaagattctccagcaaggcattttcctcttctctcatgccctatagctttagtgatagactcttttgtgccctcctggtactgtttgtagaaacagaacatatgaagaatacctcctgcagagaccaccagaaaggcacagattcaacctgtgtgtttaatttatatctagctgcagtcatgggttgtactgtctggaactggtaattactggtgagccagtacattgtctgaaagagaaagctgatgagtgaacttaaccaagattatcttcacgtgtgaacactgcgataaggcatggtctctcagagttagaactagttgagtgaatgtcttagactgttacaacagaaaattcaaagagaaataatttaacaaggatataggtttattttggattgaaagttatggcagtccaagagcatagtactgcatgtgttaatttataggaagggtcacctactatggctatatgcaaagtgacaaaggaaaacatgaaaccaaatatgaaagtgaagtcctgtgacaagacaagcagcaaaagacaggagggagggtgccctactttgaaagctgcatggacccacttttatgcaggaaaactaataccacacaatttgacctgccctgaactaaaaacggtcatcgttttagcgatctccatgcaggtcttgctgttactttagcgacaaaactcaaaataagtttccctgaagacaatccatgtgcaaaccttgaaaagtcacttgatagggtgtttcaaggagggttgttcatctgtgggatggtgcagcatcaaagcatcaggtttctgaggcagaactgagaatttacacgaagcagagagaaggggttgaatgaccagttgttacaacactggcacactcatggcgtaccctcaacttagttctattatctgtggaggctttggagtttcagttgcttgcttccctcattatttagcagtcaccatactgactgatgaactaactatcctggctatgtactgtctctctacagggaaaattctgttctgtaagggtgaaaaactaaaatttgtcagtttatgagagcacctaaaatcatctggaaacccacccacaggaaaacctttaggataataagaccttgaaacttttatatagaaaagatatggtgagatatatatatatatatatatatatatatatatatgatatgtatgcaattaaagtaaaagaatccatgaatttggagatggcaaaggagggagtgtttggaggtaggaaaggaaatgggataaaaatgtaattatattttaatttcaaaaaattaaattataatatacatgcacatataatttttgaagtatatatacataattataataaaaggaaatatatattgtattttcagatgtatgttaaaagaaagggtagagaattttttcttgcaattatgtctaggttttattcaattttttttcagtgaggactttccccaacactatttgtgccatggaaacattagaaccaattaatacagatgaaagcgaaagatcaattccaatctgcaagtctttcctgagctctccgacactgggagtgaaatgcagttagtgccgtacagtaggaagcagtgagggcctctctgctctctgcttctaagacaactgaagaatttgcttctctttgtagtttactagggatgcaaattattgcatccccagtaaattcaacgtgttatcacctatcaggcatctcttaaaacaattaatatttatacacttgtttcatcacattttatggatacatatcatatatttaacaataatctggctatctacctgactcccaggctagtgggtaagacttcagttttatcatataaaataatagtggagcaatgtttccatctgatttccactgccgctgcttacaatagctcctattcagttgtatcatatttgagcagatcttaatcccttggcatctgagtctttagccttggtaaggatcaacagaagcatttccatcatccagcccgggctaaaacacataaattcgaagtattataactgtaaattacaaaatcactcagcagcctagaactttcaagtaataaaaacagaggtaattgtgtatagtttttgtaattaaagtttccttacctggaagagaattacatattttttttcagttagtgcgattacaataggatattgtaatatagaagatttgggttttattgaaaccaaacttagtgggtgttctcttgtacttttttttttttaaaaaaataaggtaagaaatattttccttgtgaacacagaaattgagttcagttaaaattctgtatataattaataaagattaaaaggttagtactgaacctatcatgaaattcagatcacacagtcattgcaatcacaaggcagttatcagaatagacagcaatcttgtcttaatactttaaattaaaatgtgttttaaaaaaaaacccttccccttgatataatcagttgtcagctgactcttatgtttaatttactgtgtgtaacaagtgttaatgtatagcataaattcaaatcttgacaaaaatgattattttaaatactgcagatcaactgtttaaattctcaaataatgttaatagccttttaacatataataagactttggttctcagttctttaacattttaattgcttttgcgtattctcttcacaaggtgccttactgacaacttcttagtattttatggtcaattgacttggcctttaaaaacacgggtatagttaagccttgaccccttctgagtatctaatacaaagttaatagctacatttcaagtataaataatcagcatagggggtggagaaagcaggggactacagacactgcccgtcccccatccccccttaatgtacagcctgggctgtgtcttcactccctgcagaccccctgctttcctgaagttctctctacacaggtgggcaagagaccttgctacaccatccactagaccttaagcgggctggtgactagggagggaatgcacgacttcttattagtctgcctctggtgagggaggattcttagcacatagtagggcctaaaagatttattacaacttgaaaaagcatctgtgagagcacagcagtgcacagaacacatcattgagtaaagtcataggtaaaacaaatactcaacccatgtggcttttatcgcgcccacacccccaacgtgatcttaaaaaatgaagatggttttctttgagtgaaaaagcatggggcaggcagaccagtgaggagccacctgaaggagcttccaaataacaataatggagaggtgttctctgtgttttcttgttatcttggcatggatgatagctatgtgacttggcttcatacaaatagtgagtgtgacaaatgtcaacatttgagctaaaacatctctgcaatgacccactgacttgatgtctaccatattctggtacaatcttcttactccaacaaaacagaaattgccaaagatatgctgcttttcaacatatatcacgcatcaatacttcacccatgtttgtattcatactactgaatgtttcttgacatgtttgctgttccacaaattcttgctaaataagcgacatgttactgtaaaacattggatactgcagaagacatacaccaaagattcaccccgcattgccagaagaattgtattaggccagagaaatacccagtgggtcagcagatacccagtgtctacctgaaagggaaaagtagaggagctctctactcctaagatttcactgaagtaaagtggttgtcagggctctcttgaaataagtgaaggcaattctgaagactaagtagcttttacgtcaacaggattccaaaagtatttgggacagaaagtaatcaaacagataaattgaaccccagatacccctcataatcaaaatgctttccttgatggcactaatatgtcaaagcagagggcctggtgaattgtgggctttgcctttgagggtacctgtagcaagaagacatggctcccatcttaaaggtatgttgtgaaagaaggttgtgtaactgtgggaaatgatatttttgcattgtgaggaagggttaaatgtgtggcatttatttaacagaaacatcaggtttaaaatgtaagcaaagaaaactaaataaatcaattggcagtattttacaagtgttagatttgcctgttaacacacagatcacctcacccctcaatatggccaccggttcagtagtcctgagaagttcacaggcagtgcctctggctctgctcgcacactagactttggaaagctatcactaagtctacctgtgtacaggttaaaaatattctactgggagctgaaggctggcattaacttcagccgttaagctatagagacaacagatgggcaggaggtcggcatgacagctgccctttgtagggtttgaagacaaatttcagcaactttagttaggagcacctgctgggtttattgcacacctgccacagtgcaggtggaaaggctggagagaaaggaacaccgctgagcagaaagctcctctcctggaattaaaaggaagacattgtggagcggagttaggataaagtgattactgagaaaccagacacatgcatgtgcacacgcacacactcacagaggagatgaacctggttagagtcctttgggatttcaacggcaccaagatggtcagttgagaggttcataaacatctgaaaaaagcccctgagcagaactgtctgcaactatcaggaattgtgacttcttcctactttgagtttatgaggtacaaacaaccaaaagatgctgccttcttccagatttggagcctcctaaaattaggagagatgtgggatatgttgccatagattgatggggactggaaactaaatggttaatcgagtcaaggcatacattaaaccatgaggtaacaagaattctagatttattactgtgaccataaggggaagtttatatatatagctgttttccagataaagggtctgaattgtagaccctttgggcctgctgctcacaatatagccctaaaactcaacttatctttttgctttaacctcctaaattctggcattaaagacttgacccatattaaaacaaaaacagaattttttaaagatttaatcttaatttcaacttctctgtgtgagtgtatgtgtgtgtgtgtgcacatgcacacacacgtgtgtatgctatgctatgtgtaattgcccagggaagtataagagggaatcagatgccttgaaactgtagatacagtccactgacagccttcctgactatggcaaaaggaagcaaacacatgacttaaagaagatcagcaagtgttttgaacaactgaaccatctctctgcccctactaaaaagttttgatcagtacttgttatggggtattcaagtattgggttaccatgaggaagtgcatgttgtcatcctgagtgtgggagctggtgcttctctcacagccatggagatgctgaagttatttagcagtttggtctgagagaaagagaaacaacagggtgaatcttctaaccttaagaatgagaaaaataatgtataatggtactagtggtagataacatatagttatggagtaatgctgatctgttgaggagggcaggtattgtgtaggaccatagattcatgtgatagaggtcagttattactgcctcagacaccagaaaactactcaggatttaggctcccacactgatggagacaatgtgaggctactgtcataattccaagtaggcaggtgtggagaagatattagagctttaagcatacattatttctctacaaaaccacaaagcaactattaagtctggaggtctttgtctcctgtcctcctcagccctacttccaaaagacagaaaagaatgctgcaagatttcaataaattatactaccaaacattaattggcaaaacatttgcaaagcttctaagttggtaattgaaaaggcaaagtcattcccagtagtttttgcgtaggttacagtttttcattctgattagcttgtttggagcctcattcagtgaagtgtttgctgcaaggacatgacgacttgggatggatctctaacatccaaactaaaacacaattgttttagttcaagccttggtaacgtggagaccgacagatccctggggcttgtaggcaagacagcttagcctacatggtggattcctagattctgatgcaaaaaaaccaggtagactggttttgatgaataacaccaaaggttaacttctgtcctctatgcacacacctgcacacacaggagagagagagagagagagagagagagagagagagagagagagagagagagagagagagagccttggccattttacaaacattgccactgagttctatccctgcagtacacatgcaaaggaagcccaccacatctcaataaaactttatttcaaattggggtagatttgggctgtaagccatggctttgtagctccgtgctaaagagcctggttagtgtaagcaccatgttagtttactttatacacagagtatttgagtctcagtaacctcaagatgtgatcatcattgacgaaaaggtattaaatttagggttgctaatatcttactggaacaaataatagaggtttgaaataccttttcagagacaggatctttctttctcttctaatttccaaaaacaactctcattgtggttgcatccagagactcagtggctccaaggcaaactgttttattcacccaagaatgtcctcactcggccttttgttttcaaatagcaagcgtcccagttgcacattaaattatacagctgaggcatagactttcctctaagctccaatcttagctgttggcacaaattctggcctttttatttctatctgccctttcaaagcttctcgttcatttatctctgaaacagatgttgcagtcaggtacctgatgtctacctccaaagattggcatatggctccctccaacccattgtcaccttgtgcatgaatctccagctgctgaagctggggaaaggcttctggcaggcagtgaggaccctggggattcatctcagcatctcctagaaatgtgctgaggctctgggggagaaaaggaaagacagccaggacaagtctgccaattttggggtttcatctgattcctcgagggactccttttgtttctttgctctgcttgcaacctgtactgaatgaggataggacacgccatgggatagaagcactcacatctgctctctcacttcactgcataggaaacgggccacacacagtgtgagcaagaggaagggcagtcagaaggacctccggcctcccgatctttggatacatcatgaagaaatggaaatgaaaaatatcgagaagcctacgggaaccgaccctgcaggaagagactcccccatccagagctgccaagatctcacaccagtcagccatagccagtcagaaacccagatgggaagcaaaagtgcctctcattcaggtaatgatatttgctttggggtgagaaaagcccactgggggattctgtactctttctttgatggaggtagctcctgacactttgcataccattttgtgtcatctatcaattaaaacgagctgatgaaaatttggtgacacatctgtgccctctatcatcctgttgccttccttctctaatttgaacaatctggaaggtttctttttttttttaatagtttagcagcaaggcagctgggaaataatgatgtgaggagcctaattgaaatgatcgcattttctgatcttgtacaaaagggctatttaggcaatacagtttgaggctagccatacagttttacactcctgaatctcggtggaccattacaagatgattctcaatctcctgtcaattcattatttggaaaaaatagcattagtagcaaccgaggaatgaaaacatcattattttgacattcattaccatggagatcaactgtcatctctagtcgcattattttgtgattccctcactggacacagtcatttgaaagctgttggtatacagaagcaaaggaagggagtatcaattgtttgatagactgcagaataataattgaagtccagggatcactaagaattcagtaaagtggttctgaatacactcttttctgcaggtcatcaagtgtttgttttctagaagtgcagtagcatgtaagctggtgaccaggacatgctgaatatacttgtgaaatgagtgtccactcttcttagaccaaattaaataccttagtcaagttaatatgaaactagttttctcaactttttttatttcaagaattctgaaacaaggattttggtcactgatttttcaagcatgggctggatagtcctctcctagtctttgaatggcatctctagaagatttaagggcagcctagttatattgaaaacaataacctaggaccattaaattctttcaaatttctagtaccttcaagaagattgaaatgatcaaacaagacagaaggctcatggtctgtttcagaatcgcctttatgcatttccctatctgttagccatgtttccattagtatagagaaaataccagaataattgaactataaagaagaaaggtgcttctgacttacagtgtcagagcttttggtctaggggagcctggcctttttgctgtgggttcataatagcaccatcaatcactgtgagagtataaggcagaggattttggttcacctaatgccagacaggaaaataagaaaaaaacaactcctgaagacagaatgacttcccaagacaccctctaaagttattttctcaaccacccaacttcttcccaaatgttctcacattccagtagccccaatagctggccgccaagtctctaatatatggattcagaaataagagtcaaaaaccaactcacaaagcccagcctttcctttctttagaggcacatgagagaaaggagtgtcataaaaatgagaagagtcaaaaggactcctggaattcttcactttctttctctgtgggggccctatccagatgctacatctctccagatgtgcaagtatatatccaaacacttgtggaattcctccattgcccaagtctaggctattagaaatcagctcatggctctccctgcaaaatcacaggttctttgctgcctaaaagtacttcggcagttccaggaagaggaatcaagccgcagtaacatttctatgaccacttgacccacaagaagttcctacatccttgacaaaaccagccataagagatcttattcttctgtgggctttgactccttctgttacctatccctctgtttagacagatatgagaggtcggcatggccactgctagaaaaggcttccttccatctgcagaaaggaaagcaatatttttgaaggaacttctgttcctttcagagaattcatcttgcagcttaattctggactggacaccaggggccgcagaatgcctttgcctccagtggagtccattgctttctaggatgccattaatcccctttttctttctatactgagatggtgcttctagtagttaaactagctttatgtctctcaataaagtgctaagggaagcttgatcttagtggtggctgtttgctttgaaatgagaggtcacttgtatctgtttaccctcgacatgaggacagcattgctagaagagaaaggactcttggctgccttctttgcttgtcctttttaatgctttgttgggactagatcacaggtatactaagcttggcccaatgtcccaatgtagccaagggtcctatatcctctacttcctgagtgcttgggaggaaagtatgttccaccatgccctaggtttatcataaagttgctgagcaggcaatcactccataaggaaagatgaaagcgccatgctcatcattttcatacatatatgacgcttacagaatctctgcaatgcactttgagataagtgttattctcctcacaaaataaatgaagcaaattaagcaagctttagtttttataggtagcagagtaggttatatagtacagtaggtgatggagtcatatagttgcatattcagtacggtagtttacgtagtcagtagtataggttatattgccagcactttaggttatagagtcagtagtatagtataggttgcagtcagtactgtaggttttatggtagtactataattttcatgatcagtactatagtttacattgtaggtttcatggcatggtaggtgagtacagtttgttaatatagttaatacatagttaatacagtagtacatagcaccatggtttcattgcctgtactataggttacagcgtctgtactgtagttttcatggtcattcctgtagtttacatagtcagtactttaagtcacatagtactatagattatatactcactgctgttgctcagtagttcccaacctactgaatactgtgaccctttatttaatacagttccccatgttgtggtgactcccaaccataaaatttactccattgctatttcataacagtaattttgctacagttataagttgtaatgttgtaaatatctgatacacagaatatctgatatgactccccaaaggagtcatgaccaacacgttgagaatcactgctgccattcatatggccattactatatgttacatatacattgcgggtcattcatatggcctgtactgtagactacatattcagtactgtggcatgcacagtactgaccctcaactacatgctttaatgaccaaatttcaataatattatttagtaattttatagaaggtgttaacttcttccccatgcatgaaattaattctgaataaacttaaaaaaaaatcactctcagtgtttggatttccgcaacagaaagggaagtgaattgagcattagctgaactacgtgtttcgtcaaatacaatttcccgtttgcttttaataatttcttccaccctttctatccattgtacttaggtggtttagaccaaccctccttttccacagccacacaagtagaatgtcctaccgatgtcacttatagaaagtaacatgctagatgccatcacgcagtgacgactctcttctgcatagaatgggtttcaaacttctcttcacataaaaaaaaaaatcacaaaaggggaagaaatataagcacctggatgtgtgttatctccatatttcgatgtagaaattactcctagaaatgaaacaaagtataactgcagcagagaaatcccagggattggtccctaattttcatatcttatgcatagaaatctacattttaatgttgtcgcgtttgtttatttgacttaagaaagggcactaagcataccaaaagacatcttttataatgtaacttttattattgtttgtttttaattatctacatgttcaccaaattttttgcgggagtgggtgggttggtgagcagggggaggatgaggggataggggggttttggaggggaaaccaaaaatggggataacatttgaaatgtaaataaagaaaatatggaataaaaaaaatcaaaaagacaagacaaaacaaaacaaaaaaccctaatttctctagcaaataaaatattgtcttcaaaaaaaaatgttccaacgctataaggataaatggtgaataatgtcaaagccttcagatgttgctacatgctctgacctggataaagggcctgctcaaaagccctgttgcatgcgctaccctcagtaggtggcgcttttgggaattgttgggaggcgtggcctagaggtcagatgcctttgttcattagagaaatgctttccagggctaagtggagaccccaccccccatttcagaaatgatgtgctgcctctccagaatctaaaagcaacagggaatttaattacaaactcaaacttccaaagcttaaaactgttaccttttctgtttgtaagttgattgtctgagggtatttgttacagtggcagaaagctacacaggacaaaacagcaaaaatatctatgtgtcaagaattgtagaggaaatacttcggtagagttctcaataggtaaatacaattctaaatggcttatccctagaattaaaatgtcgctgcagaatcagaaatataaaatcacaggcaattaacagtagtaaagggttcatctgaaaactatagaaagagttccttaggtgaatctagaattacattttccttcattatttatttattcgttgtttatttgtttgtttgttttcgagaactaatacctatagtagtagatactattctggttttcattcccagttactaaacattattttgaaaagtaaacatcaggaaacaattgcatttattttatatatttcctattgatattgtgcttccatttctgaagtaccttgtattatttatattgatttacagaaaatgagctgccattccaccaggctgaaagtgctaaagaggaaattcctttcatttttgtattgtcagaaaataacctgactttaccattattcttgaagcacatttactgatgacgctctgcagataacttctgtatcagcagcttgtctgagacttgaaagttttgtcacttatgtcttatagcatctgagaacttaagctatggaaatcccactgccattcacagtggtacaccactgtacttggcctaagttgctatattctcactgccttcaaaactacttgccatagtcagggtttctatttctgcacaaacattatgaccaagaagcaagttggggaggaaagggtttattcggcttacacttccatactgctgttcatcaccaaggaagtcaggactggaactcaagcaggtcagggagcaggagctgatgcagaggccatggagggatgttctttactggcttgcttcccctagcttgctcagcctgctctcttatagaaccaagattaccagcccagagatgatcccacccacaaggggcctttcccccttgatcactaattgagaagatgccttacagttagatctcatggaggcatttcctcaactgaagctcctttctctgtgagaactcaagctgtgtcaagttgacacaaaaccagccagtacactactgttactgtctctagttttaaggagtacatcagcaatgtatccggcatagattttgctgatttgattatgaattttcataaatttctatattatagaggttctttgtctgttaataaattcagagaatttttacctttaaatatgtgtcagtgtgacactgatttttcatctatccttttttgaatttttagatatcacatttctaaagaagataggtactttcttttccaatatttcctacaattgttttaggtgtgatcctatcctccaagacaaatgcttggcacttttgttgaaaactatgtggctgtaattgtgtgggtttatttctgggccatgtattctattctacatgtttgttattctgccaacaccaacataccagatagttttacttactatggctccgaggtatactttggggtaatatgtgataataccactcgctttgttctttctactatttttatgttgctattacatcatgctccttaaacctaagagatttcctggggcatagtgtcctttaagtgtaaaatcaaatcacttatatagagactttttttaaacttagagaaagctgtatttatttggaaattattattaatgattttatcattgttaatttatttactttttaggtcaggacactgaggacgcaggcagctccatgtccactttggaacggtccctggcagcacgccgggccaccagggccaagctcatgattcccatggaggcccagtccagtaatcctggtcagtataacttggtatcaaaggtagaaaaaaaattaaaaggctttcaatttgcactgttttttataaatagcaaatcatcagaaataatttccttttatggtatgattacagggaaataaggacagctgaagatttttacaagtcatgtcatttataatgatcagtaatggtctttagtatgtaataatatctttagatactcagtgttagcaaacagatggctacaattcaagaagttatttgtaataatatgaatttctgatttaaaaaattcaaaatggccattgaagacattgatctgattctatcaacatcaacatcatcacagctaaatttttcctactctagtaggtcaagttttcatgcttgcacaactgagctcaattaaatcgagtggtatcagacattctcttgctggccctccttggtggaggtttctgcctacctcctacattcactgaaaaaattagcatctggggatcacttcctttccaattacctccataatcaatcttggtaattacactgttcacgtagataatccatctgaatccctgaactgttagttctttatggtacctacaatgatcttggctccttcccatgtcaattcatcaattccaagtcacactaaaccaatgcttggtgtctgtttctatcaccctttctattttcatattagttattttttgtttttgttttttgttttgttttgttttgtttttttgctaacttattttattgccccagccaacatttcctctatgcatatgggattgccaatttgtaaactctctcataatccctctgcaccccatctcccatagtcctcatggttcctttgttttgtttcattttctacctcatctgctttgcttctccatcccaccagtattcacttgaaaagaaacaaaaattcaaccatcattaagttagtaactctaccaattagtattccagtccctatgaatggaatgtgtctggagaataataccaagctgcctcctgggtacttttgaccacaaggctagggttaccattcattttactcaataaaatgaatgacacactttttcagagttcaataccttcttcactaataatatttccttgaaattaggagtacagttcagagcatttgcctagcaggcaatagagcttgggcttcaaacaccaacagcaaactctgagagaggaagtaatagttatcaccaccattgtctttggtcttacatcactaaaagaaaaagtgtttagacactcttgttgttgcaacaaatccagctggtgtgtgtatgttaccatatgatgatcatcttgctaaccccattgcttttgtatgaacttaactctttcccatgctccgacatcacatttcctccttactcttctttgcagtaggcatgcaaacacttacaatctgtcctaactcctgttttaaatcaatcatttagggtcattttttacaccaaataaaactccagtactcaattgcatagaacatataaaaagcattctctttttctactttctgatgctagctttgattttgctttcatatttgctccatcttgagaccaaggtagctgtatagtttcttttattataatcaaacatcaggacaagaagcaaatttcagaaggaagagtatatttgagcatatccttctaaggggagagtccatagtagccagcaagttacagcagcagttggggagaataggaagtggagagatgacatctccattgacccacaaaaagcagagagagagagaactggaagcagaaagaatgtatgaaccctcaaactgctccctagtgacgtgcttcgcccagtaaagccaaactccttaagcttctcgaacagtaccatcaactggtgaccaagtgttcaaatacctaagcctttgaagaatagttctcacttaaactatatctctgtccattgttgtcagtctatctgtgccatcttaataagtaatcaactttcagctaagtgtggattgagttccttggtatggtgggaggaagagagagagagagagagagacagagacagagagaaagagagagagagagagagagagagagagagagagagagagagagagagagaggtggaacacacatgcatacacacaaacacacacacacacacacacacacacacacacgtacccacacagagagggagagagagacagagacatagagagaagctttcccccttgatttgcaacatgttgactactttctcttctccttcccattggctgttcctgttcaccatccttcttctccttcttgacttccaagactcagagtgagctagggctccttcttagggcagctgcctttatccatgacagtaaccactgagataacatccatggccattagacaatgtaaatgctgatgatcctaagttgtatctccatcgttatcccttcccagaatccacatgaactttcttatctactgtccactcagcttctgcagatatcaaattggtaccttagctgtgattgaatctgtgacagcagcttcccataattccctttgtcatccgtggaactggttgtggagcagttttcttttctgaattcatgaaatgccatcacggcccatcctctgctctcaccagaaacactaatttaatttttctattttgtttgatatttttaaaattgtgtttactcatacgtgtatcaatctctatgtatgttatttacagaggccagaaaggagtattaaatgcctcaaatctggaattataggtgtttgtaggataccaggattgttatttgggagttgtgtcccaaactctggtcctcataattttgaagcaaatgttctttaccaccaagatgttgctctattcccctttgttaatttatcctgatattctcacatttcaaattaaaaaatttgctatatgcacttcctacttccattgtatttgtctgactccacctttttttttctgtaagctgcttctctcacttatttatagtctattacaacatgcttaaaatccccccccttccctgctagttgtttatcttctgggtagttacctgtgcaacagtgttccaatatccatattaaatcaccatacacctgaatacatatagaacaacactttagtaatgttccacaaagcttcatatggtcaggcctctgtatttatctctgacttcacctctgtacatttatctctgtaatccactacaatatgaacccctcctttatacacattaggcagcaacatataccatctcaggtacatgtgtgcgtgcgtgtgtgtgtgtgtgtgtgtgtgtgtgtgtgtgtgtgtgtgcacgtagtataacaggactgttatgtgggtgctttgtcccaaactcaagtcctcatgattttgaagcatatatatatatatatatatatatatatatatatatatatatatacatgaaaccaaagatgtacattgtctttaaaatgaatataagaatgattagctctagttaccattatgcctgatgcactgataagagaactaaggagcagagagattaagtcaccagtgtatccagctaagtaattagtcagagttaggactgaattaggaattccctgttctgggtgttactgttctcccagctgcaatacttcatcaatccagtatcttcactcttatataatttctactacatagggtaatagtctgtgtagctgccattttctagagatctaattgttaataagaaacttctatttgaaggcattacttctaaaaacataactgtattttagaaagtttagagacaattagatccatatatatgtgcctcattcaacaggttatcatgtatcattgactgttttcttcatagtaaaccagaaaacaaacaaaataaccaaacacagcacttcaaactcacgaatgtattatttcaaagatgggtcctaactgttagaccttcagctcttgccaaggaagactgtttagcagttcatatccatgtgtcccttccctctattctttaaaaataactcagtaaagagctacacccaacaaagttttatgtgctttcaaacaccagagcagacatggatgatgtgataaatgccttgaaagttacttaagtagaaatgatggctcactttttcccatttgaatagcagtgtttataacactttgtggcatttattacatgggctgctgcctcatatgcttaggtattcaagtcaaaattctctcttctgcaataccttgtgagttatttgtgatacgtatgcaacgtagctaattcatcttcatagtcacacattgtatagcttagtaccttgtaaaaaatcagtactcagtaaatatgttgtcgaataaatgaatgaatatatacataaattaaaaggatgctccacttgtgtgtgtaagatgtgtgtttgagggctgatttttatcaagaatagggagagcatctgacacattttccagtatagtaaagccagttagtattgtttcagactatgagaaaatgggtttgtaaaggaagaaacatcaaatgaaattagtaaatattgagaacatttgattgccattcacatggtaaacgcttgctaattttgatttcatttgttcttacagtattatcatggcctcacgcagggaaaagagccttggcctgcttgagggcctgtctctggtacatgattctttctataaatggtgactcttgagagtatagggcttcttcccagataaaggtggctttcatgcttggcactgtccacctctttttaaagtgtatccacctctttgtaaaaccttcctttgttttaaattgttttgaaagtatcatatcaggtttacaaatatggtgccagtcctctgctcactttgtccagtggtatctgcttcatattctcacctagagttttgagtgtctttctgactaatgtgactaatattttgtagtattttattttgtgttaattggacctcacaatgacgcaaaactgactttgctattattttaattttctaatatttcatgtacccattttcaatctactaagtggtttaaagtttactataatatcctggcccaattagtccattcttggatacattctatctttgtagataagtataaataaggtaattttggataaattcaaagtatacttatcaaagaccatattcagctgtagccaatctttgtttccatgaacaagtacagtataaaatactcatatcacacaataacatgcagccataaaataaataaatgaagtgataagactatatggaacatctcaaagacataatgtttttgaagacataaacagaatagtaatagatttgtatggtttatttttataaaatttaaaggccaaataaagtgatctttggtcttagacctccccaaggcagtcagtattgaagaaagtttatgagtgactataaagaatgaagatgcacacactatggctgatgctctctctcttgctcttgatggcaattactagatatttcactttagagagtcgtgaaccactatgattagtgtagcccagcttttccatacatagtttatactgcagtaagaaaacatgacacaacagggtatttatttttaaaaatattttcacattgaatcattacttgttccttgaaaattatgccttggtaaaattatacccaataaaaggtaattacttcaatatgtgaccatagtcagttccagaataaattcataagcatttgataaataaaatatcctaaatacatctattgtgtttggcaaatatattaggtaaccttataatgctaaaatttataagttgtaccttagtagatttatgaattcatgcagtacagaatataaaattttctgatagcccctctgcatttacttggttttgttgaggtctaaactctgttatcaagttatatataaaccaaaactatagcattattttaatttctagatatagatccatatggttgttgttctgcttaggatatcttatttttctgaggttacttgtcttttttattcacatttcttaccatgttaagtagttatagattgtttttataaaaccccactacaaaaagtaacatatagaaaaaagagttggtttgctgatatatatatatatatatatatatatatatatagagagagagagagagagagagagagagagagagggagagagagagagagcataatagtagcaaagtatgtctgctgaaacaggcacctgaggaaacttgaagtatgacaagactatgaactttcaccccgatgacatacttcctccaacatagctccaccacctaaagggtctcccatagcctcccccaaagagccctgaaattgaaaaccaaatatctaatcttaagaggagaatttatcattcaaactaccataccactgtggccaaaagaattgcttgttagaaaaatataaattaatcagatgttgtgtttaagatatttaaaagtaaaagagagttgcattttatttagtgggtgagcaatctctactggttcatcaagattacacctatgggttgaaaatactttgcttttcattgttccatatgagcctccaaacagttgtcagcaaagtcccctgatgacagtgtgaaacttggtcaacagtccaaaaggtttggctcaccagtggttttgcccattaggtgtatgctaaaggcaacaattattacagtagctaaagtagtattttaatgccattggtttttactgcaataaaagcagttacagagccaaatcaagtcatgtgcttggttttcctgtagacaggctgttactatagaatgagaagacagggggtagatcagtgaagaccttcctgaataatactagtgagagtgagggcttgtgagactatggtaaggaagaagtgaagtttgcgatactgcttaatgaaggtcttgggtgagttggaattatcctctagaggtatcccaaatggtgctaagttggagatggccttctgcactttaatgctagtagtctttgatgcatactgtgatcaagaagtgacaaaaaggtacttagcttctgttgtttggcaggagtctctttacagctctaaaactgtatgcacaattgtatgtaactgtatgtgtggccatctccagctcactttcctctctaaactttggtgtagaggaagagtgtagcacatgagctgcaacatcacataagtaatacaactctaattgtattaatataaggtagtttagtggataaaatcctcttttttcatttttttctacttctaatataagtatctgataagagaacacaatacaaagcaacctttaatataaaaaggatagctcagaaacatagtgtaggatatggtaaaaagtatcaagaaagtaagggactacagtttacttttatgatagcttaagggctacttattgaatcttagctttctggaaccttcaccaagagactcccatgtcagttgtctgaagaattcactaagagtgaactgaagaaacttgaaaaatgaaatatagcttcaaggaaaaataagatttttccaaagtggagttctattggtctagctacagtatcactaaagatctcgatctacagttagacatagagaaggagtcatctagagcaagataaataacccaggttctgggacatttaaatgaaatgatgaattcttttcttttctgtataattgttatagttgttatatttatccatattaatccccatctatgtatatttataaattcacaactattagacatttgtgggttatatagctgcattgcaacaaaaaagacctcagatgaaattcctaatagaagaacataaaggttgaggagatgatagggggcatcgattacattcagatactgcataccctatgatgcacgtgccgtggcaggcagtaaccagagactacagagcatacctcatcttgtgtaaggtgtctcacgtgcactaagagtgtgccagccacaactagcaagacaaatggtcttcccttagctcgcaaatgaaacctccacaacttgaatccaaaaaacattctgtcatcctcgttctggtatttctcacccacaaggaaaacaacttttccttctgctctcaaagtcacacgccgtcataagcccttcaggttcaaacagcagcgtcgacagtcctcgtgaccgtgacaattgaacttgactgttgacactgataaactctccattttacaaatgaggaacccagcatatcttaaatgtttcacttgtttgcatattatcatatccaataaattaccacaaatttatctccataaaataatatccacttattttatctattgtttctgagtgccaggaagcaagaacatttaaagtaaatgcttctggctcagaatcataagctatcttacaaaatttctcacagacatttgggctgagtcccaaccctgcacctctacaccatttccttcataatttggccaacatcacctaaagactcagcacttgccttacatgccccgtgctgtctgtgatgaccaagaaaacgtgggtgaatatgcaagaatggaagagagatgaaaatctttttagcctagtcttggctaaaatgccaactcccacaattctcatagtcatagaccaacctgggataaatcacaggagaagctgaaggaaggtgtcatagagcagggacatcagggaccaccttaggtggtcactaacaggtgacaaacctaagcactgaacccagatagttgcactcaaagatttggccttttgacagaaggtttagtctaactgcaaagcaggcactggagagtatgcaggcaagggccagttgtgatatgttttttatcaatgaaaatctgagcatcagagataggttagaatacttactattgaggacaatcaacactaaatgttcaaatcttccagattatagataggtcattgcagacacgttatcatcaaaagaggcagcaggagaaatagtttcactcgaacatattatttttactgttatatttctcccctgttctccttaaacaaacctctcaattcagtcatgtatcatgttgagaaatatctagagaagatttggttcttaaaacttacagcactaaattcaagtcttcacagtagagttcctgtaggtttcacttagtgataacatttttaagatggttgtaaaagttcccaaatgccacagtgcctgttcatggagctatgtatttgctgaggaaatttctacttgaaaactccccgtgcatcagtgtcacacataaattcaattgccagcaagctgtgtcagaagagacttcttgtcatatttggccacagaagtggagatttattgaaactgaaagatagtattgctccttgagctgttgtacataaatagtctagtgaatactaaaaatgctgtgtgtcccggtgtgagagagtannnnnnnnnnnnnnnnnnnnnnnnnnnnnnnnnnnnnnnnnnnnnnnnnnnnnnnnnnnnnnnnnnnnnnnnnnnnnnnnnnnnnnnnnnnnnnnnnnnnnnnnnnnnnnnnnnnnnnnnnnnnnnnnnnnnnnnnnnnnnnnnnnnnnnnnnnnnnnnnnnnnnnnnnnnnnnnnnnnnnnnnnnnnnnnnnnnnnnnnnnnnnnnnnnnnnnnnnnnnnnnnnnnnnnnnnnnnnnnnnnnnnnnnnnnnnnnnnnnnnnnnnnnnnnnnnnnnnnnnnnnnnnnnnnnnnnnnnnnnnnnnnnnnnnnnnnnnnnnnnnnnnnnnnnnnnnnnnnnnnnnnnnnnnnnnnnnnnnnnnnnnnnnnnnnnnnnnnnnnnnnnnnnnnnnnnnnnnnnnnnnnnnnnnnnnnnnnnnnnnnnnnnnnnnnnnnnnnnnnnnnnnnnnnnnnnnnnnnnnnnnnnnnnnnnnnnnnnnnnnnnnnnnnnnnnnnnnnnnnnnnnnnnnnnnnnnnnnnnnnnnnnnnnnnnnnnnnnnnnnnnnnnnnnnnnnnnnnnnnnnnnnnnnnnnnnnnnnnnnnnnnnnnnnnnnnnnnnnnnnnnnnnnnnnnnnnnnnnnnnnnnnnnnnnnnnnnnnnnnnnnnnnnnnnnnnnnnnnnnnnnnnnnnnnnnnnnnnnnnnnnnnnnnnnnnnnnnnnnnnnnnnnnnnnnnnnnnnnnnnnnnnnnnnnnnnnnnnnnnnnnnnnnnnnnnnnnnnnnnnnnnnnnnnnnnnnnnnnnnnnnnnnnnnnnnnnnnnnnnnnnnnnnnaggctcttccagaaaagcaccatgtgtctggtctcaacaaaacatcctcccataagacagtttccagaaaaaacaacacatgacacaactgagtgtccaaggaaaccaaagatttccacttcatcctggtcctcgctttttattttgaaacaaggttccactaagttgcctgggatagttttgatttccttccgtagtccagactgtcctcaaacttaaggtcctccaatctctgcttcctgagtagatgtcattatgaacgtggaactccaggtccccgctagagtgatgattttgtactaattgttttacaaataaatgtcaacaacttctggtgtcttcaaggattagccataggagctaatgtgacagatccacagtgaaaaatttacagtgtaaaggatgtaagctcaactcccagcacttacacattgtgtgattcacaaaggtctataagtatagttcaagggtgaatctgacactctggcttctgtctattcagagagaacagcactcttatacacatacctacacaatgatgtgcacacaagtagaatacaataaatcattttaaaaaatattttcaaaaaattaatcaatggtcaaaatatcttaaaaccaaagctgtgatttactaaacgtctttggctgtatcaggaattaagacaataagcattttttgacatgtaaaaacagaatagatgtattatttgtcaaaacttttcatgtttgcaaaagttttctaccatagtgagcctaaatgaaaagcaaacgtcttgggccataaaggcctgaggggttggaacataatctcagtctctcattggttgtctcaatttccctaccaagattctatagcttgttgatttcttttaatttctctatgcatttatttgttctcataccagaagatctttataaatctcttctttcaaatgaggcattagatattgattcataaaattattaatagaattataataatcttataacattgttcagaagttatgtacagttgaagggaggggtcttacctgtatcaaagatgattgttgcaacaataacatataaataaaaatagtcaatgcaaattaactgtaagccaccaataagatttgatggctgatcaatgacagtctgattgatcaatcagatcaaaaacaaaaccaaattaactgcttcaaacactaagattttgaaccacgtaatgagatttcatattcttttatgtttgttttgttcacaaatgccttcattctgttttttactggtgttatgagtagcagtactactatggtaactattcactcaaagacatgaaataatatgactgatgacctcaaacttcttcaacgggttcaaatatcaaaaatacaaataacagactagaaagttcttttatgactcacctgaataaatgaggcttttcccatcactatttcctgagatacacaaagaataacaaaattataactttccattgttagtatatgttagtatagtaattcttgaggcttccatctggctttaatcttgttctttgtttaaaattttaaagttcattttaaagtttgcctttttctgtaactgtcagcatgtgtgttttctacaatcacaaatttatgcagagagtttatggagacattgccattcattcttctcaaatgctttttaaagatctttctaaaataatgtagaaaactggtgcatttttgcctctccattttttaaagaaacaattcaatgtttattcattttttaaaaaattttatgtgcattggtgttttaccgggacatatatctgtgtgagtgtgtcagatcccttaggtctggagttacaggcaggtgtgagctgccatgtgagtgctaaagactgaatgctagttctctagaagagtagccagtgctcttaacccccgagagccatctctccaacccctcattttgcattttacatgctttggtacaacttgaacttctgcataaaattgctattgattcactcttcaccatcatccttcctggaatgcatggcaaggttgtcctttttgcaaggctttgtattatgaagctttattcttgattgagtatctcaaattccctactgcccccaaatcgtatgcaaacatcactaatttctgagacttagggccttttaattccagcaatatttttattgattatttgggaatttcacatcgtatatccaaaccgtatcatcacttcccagtactcccaagtcagccccactacccttctgacctcccctgcttcacaaaagaggaagaggaagaagaagaaaaagaagaggaagaggaaggggaaggggagaaggagaaagaagaggaagaggaagaaagaaagagagagagggagggagagagagaaagaaagagaaagagagaaagaggaggaggaggaggaggaagagaaggaggaaaaggaacaggaggaagaggaagaggaggaggaacaggaggaagaggaggaggaggaagagtacagtttaatctgtgttgtccatatactcactggagtgtggttgtactcccagtggacagccccttaaagaaaacggagttattcccccatctgcacctcttcttgatcatccatttttgaagtatttaatagctataaattatgattttattttatacttacatctctcctgagtctctgttctaagttttaagtgttacagttgttcttgctaggggttttgatttgttttgttttttaattttttggcattaatgttacaattaggcttttcattttgctataagaaagtttaagttttattggnnnnnnnnnnnnnnnnnnnnacacacacacacacacacacacacacacatatccaagtatgcataatactagtgataccaattgtatttcaatgttttccttatgttgacaaaaacccctaaactatgactaatctacatataactacatatatgtttttcagtcactcaatctaaacaccttcaaaggcacatgaagaatgcactctgtgtgaattcttacccagagccttttctatagtgtgtcattcatatctagatgtagtcttcctttattttggttgaaaatcagttgtagaaactttctgactatgataaattgttatttatacaagttatttatgtttgcaccttctagaagacacatgaacattaactggaccaagaataaggaagcaaatatcaatagacttgaaaacttttctgtccagtggcttagtagtatactaaaaattgttcctattgtagtgacattattaataaagtgaagaatgtaattttaataaaagaaaaggcttccctttgggaaatgtgcaaaaataggcacacaaatccagagatgtcattacaatgtaactaaataatcctttgtaaaaagaaggtaacttgccgggcagtggtggtgcacacctttaatcccaacacttgggaagcttaggcaggtagatttctgagttcaaggccagactggtttcaggacagccagggctacacaaagaaactctgtctcagaaagaaaaaaaaaaaaggtaactttaatattagagactggtacatgctacctgttagatcttaagccctagacaaatggctgaggtacctatttaatgtatcaaagctgaccctggctgccaggttttccctccatctctccatccctagctgtcacagagccctcctgcctgttataccttacccctaccctaaatttctccatcccaggggctgggtagggctgctcttccccagttgactgtccttatataatccagcaattttgattatttgaccaaggggaaacttccatttactctttacccacctggcttttaggctcccctctcccattttctcacagggctcagcttggggtttgttcactctgaagttccaagacgtgttttcagctggacatgctctcccgtttacactagacctctgccacctcccctaacagcattcaggtccttcctatttatctcttttttcatttgctacccaaacaaaccattccaatagctggtttaaataaagtccatgctttttgataatcaatgattaccaattactcactgctttataaggtaaactcaatgattaaatattaagctttactataagtgtaataaatatatcatgaaataatacagttgactaccctttgaacaatgacactgaacaagactgtctcaatatcaagacatggaccaagtgcttttctgtgggtttcagtcagaataaattcactgttggtactctcaggtaacattcagttacctttatatactgtgcactcatctggttaactttgagtgttacaaggagtttgactaaagataaaccctggttatggggacagagagtgcccctgagattgtgtgtgtgcattaagcctctggacagccatacattcatttccaggattaaatcatatttcccaaccccctgtaagtgtgtcacagcctaacatttattttgttctttgtttctccttggaagaaaggcaaataaaaaaaaaaacctgatacaaatgctggagtatggggtgcctctactataacttaatcattttctcagagccatggcagttttcaagctggaaggagatgggccataatggggtgttttcaaaataaactttctgttctccagcaagaaggaagtttccaggaagtattaagagaatgtcagtgaaaccatggagaatattaaacttttaaaaacttattcatttcctttaatgtgtgccaggagaatacatggattttttttaaatataactaatttttttttcttttgcagctgttgtgagtgccatccctgtaccaacactagaaagtgcccagtatccaggaatcctcccatctcccacatgtggatacccgcatccacagttcactctccggccagtaccattcccaacgctgtctgtggaccgaggttttggagcaggaagaactcagtgtaatgcattttctttccattttatcatgacaaatgttagtaacagcaacatcacctccgtgtatcattttggtctccttattctttggaaagactcagtgcctgtgaccctggtacaggaattttcctactcaacacattgaacactcaggtcctagcaacagtttgttagcgcaattccctaggaccctttccacagcagacaacacagataaatgtctctggtgggcaataaagagcatatggctcctttacacaatgaggtagtagatgtttcaaaacaataccctgctaaccaggaagttataaatcaaaggttgtttttcagaacattctgtctagtatctgttagttaaattaaaaaacctctacctagtcccagtgaacaaatacttgatgagtccctagcaatttttttaattgtttaagcaggactttttcaagttttggaggggagtgaacgctagaacaaaatgccatttattagagagagcaagaacggaggaagagcaaagctttcatatccacgcggtgatttctcccgtgccatttgattcctctcccctcctttgagcacagcatctttaaatcgattttatggctttcatctcttagttaagaacaggtgactcagcagctcatgtgcaagaggaggttttgtaatagatatgatagcacagcaataaaatatcttcgtgaggtaagctatatttttcccaactcaacaggggcagctctaagaaatcataaatcgtccaaatgtagcaaggttagaattaaaaggcatcaaaaatctgccaggcgagaattagattcatttcccttctcttgctgcacatcacatcgagcaaatagagttgtgtgccgaatctcaggggagaaaaaaactccaaaatcacaggaacaggaggaaggtgggaggcatgcgggaagcccagcagctagaaagttctaaatttcaaaacagctacgcatgggagtctactttaaaataaaacccaagcccacaagtcccttctttgttcctgaactgaactccctccatttgatgatattctactgcactctttttattctgcctgtatcttaggaccttaaagggacattgaagaggcatctgtgacacaactttgctctggtccttctggcacggctggcaccaaccaaagctcagtgcttttcctactagaaagtatttcttctgaccaactaatccctttgtttccaatttttgtaagaatgctctacaagtgtattcatctcacctgccccaagccctccccgccccattttttctcttgagctaatgtaggatgtgacatcgtctcttattgaatcttgggataaatattcaaaagtttaattttaatgaaaaaatgcagatattaagaaatgttttgttttgttttgtttttgttttgtttttgtttatgattaaaagaaattccctcttctcaactctattttggtaatgaggacagacgtgtggaatccagggactatatgggagtcttctgtgccttccacctgtttttctgtaaacaccaaataatgaagtacagtagaagttagttaatcattcaaaacattcacactctttaacagagttcgttttgtcctcgagcaatgggatttagcaaataaaggcaatcctatagtataataggaaataatctaccagcacaattgcacaattgtgtgcttatgtaaacaatgctttcttggcaaattcctcctgtataatttttgaacttcatccaaatcaccaggcagtgaaaattctatccctggccatggtttataccttgctttaaaatgtatatgttcattcgttcagcaagtcgttctcaacaaaatacacgcaattcaaaagaagtaacatcaaatgtgcttcaagcaattgcctggaaaagaaaaaggatggataaatgttccctttgctagaaaacaaaatattctcttaagttgctgtcaatggtggttaacatccagctctttgatattggtttctacaggccttgcagatcactaaacacccctcttctccctcaagcagaaaacactccaaggctctgggtagtgctgccttattagtgcccttgaggatcaaagaagggcacacggggaaagataaagttcatgtggccaagtgtggaggttccacttctttatagctctcttaaaatcctggaaattcttaagtcaggaaatgctataaccccacccccgaagcctgattgtttcttaaggaaaggggaggccggtaataacatttacattccacacatttccagattgatggacaaataatcccatctgtataactgcagaaccactcttatcatgaactgctgtttattataagctgctgccccaggagaccagtcctgttctttgacaatctcccaaacaggcagtcttggatcaagctttctttctcctcatcataacaattccatttctcattttgctcatccattagaccagtctagggaagaggagtataagagctttccatactgtcattgccatagtgaggatgctacacagagtagcccatgctggttttctgttccagttcctccaccaactggaagttgactaccaagtggaatttgtgtcggataaaaatcaggagcacgtagaaatgttcatttgtttcccctaggggtgtttttgagacatcacaggctatgaggacctaggttcctaaggattagttcataatgtggttcttccaagattaatgtgtaaacaaggttccaagaggaggtgttcatgcctcggcatctgcttcgtgctgttggtgggctgtaattccatcaacctctgcagttttcagatagaagaaaaatcctcatttccatttttgcagtatttctgccagttactccgtagcaagtgttttgaatgttgacattaattattataaagtaccttgagatttgactctactgtgtaattgtatgctatttgtacaatgaattctgactatttcatcatttgaaaatgagtgccttgctgacacccatttgcttctcactttgctctgaattgccaggcagctgtatcctggggctgaacggagcttttctttgctttgggggctcttcacacagataaatgccaagccactgagacaatttgtttcaaattgatgtcctggagctggtgtctgaactggccaaatgggcacatccatgatgcagcacttccctgttggaccaactgctaagctgtttcttttttttttttttttttttttttttaaagatttatttatttatttattgtaagtacactgtagctgtcctcagacactccagaagagggagtcagatctcgttacggatggttgtgagccaccatgtggttgctgggatttgaactcctgaccttcggaagagcagtcgggtgctcttacccactgagccatctcaccagcccccaagctgtttctttgaggattttgctgctttaaatatcagccaactctgaaagcattttcttaagattcaagaattatcaattacctgtgaaaaactcttgtccatgtaaacaacttgtctcttatggactctattctattcctattttatttcctacacatgggccttcttactcacatatcaggcttcacattgtgctcatgtgagttactaaggatgaacgagaccaaggctatggaccacttagggccacatcatggtgatcccacttggaataatgttagacagctggaaggcctgagaggcaggaccaggaatagaaagaattttacctctcattgatgctgatgaaaacaagtggccagagcaaaagtgaataaggatgccctcaatgggtaaagggagggcatgacgctcaaagggatggttgaaagaaaggtttgtattgtacatatgaaggagagcacagccagaagcatccagagtagaagacggaacataatcagcagaatggatggagccattagaggagaagtaggggttgcgggacgagagaaggagaagaggactgagatacaagagcaagagagtgcagggctgaaatggcaaggttatatagcaataagaacctggaagaagggaagcccgtgagctgggaaggttcaaggagtgagaggagtcgagaggagccacagacactgagtgtgcccggagaccagcatgcactttgatgcgtgaataggcacttcagttagccaattgccctccactttctttaggacctcaaactcactactttcagtaaaattcattacaatccatacattcacacgacatacaaaggttttgtcaaaataagacacagaatttcaaattcttaaagaaagacgtatgcaaattttattaaactctggaatacaataataccttattatgaacatatcatgtccaaagtaccagtgaaagaaaagaattaaagaaaagaaaaagaaataaaaggggatgtagacattcaaagccccctgttatttcttcagtgctgagggagttctaggaacaaatatggattagtcacagggtgtattccatagagataattacctaaaagcaattgtaagaagagcaatgtgacatttctttctctgtcctcataagttagtgttataaaaaccattctgagaatcatctctggggacatttttgaaagagcacgtagtattctagttatttcctacaatctagcactgaaatgaattccttttggtttgaaggaagtggaaacaagggtaccatccttaaagtgagcctccgtgaaggaccaggagtaagggaacaactctgacatcactctgaagctaagggggaaacatgctcagctttagaagtagctaaattattaaatgtttatttagaaaaaaaatcaaactttggtcactttcttcttcagattaaacacaagtccaaagtaaaacctaatattttctctttttgtaaaattaaactttcaaacatcccaggacacaatctgatcctatagaaagacatttctctcccctttcgattatgggagccatttagtttgttgtgagaactacatgggaggtttgacagttggctgttttactggaggttccctgtttgaagactgacaaagtttcatcagattttgagttctgattgctctcattttctcagccaactgtgcatcttctacctccacctcgaaaggatggttcccacaggctgttctctcatccggaggacctctgaccccagtctgaagcaaaaaaggatgaataaaaatacttccagaggatgnnnnnnnnnnnnnnnnnnnntgtgtcacttctgcatatctttcataggacaccttgatctttatatctttcaagtctgttcctttggcattaccacattctttccctatctcctctgccctttgctaaccttagtgagattctcagagtcctctcaaaaccatctcctaaaacttattatcttgaaataattccaccttaaaattacccttccaaagttaggtattatgaaagtaatatcgtatcttcccattttttttttttgccaaaacttatcttgctaagaaataaataactagaaatactcatgtagactcaacgtcacttactcctagtaggctgccctttttatctgtggtttaacttggacctttcggctttgaatatgaatgaacatttaaaattgatgcaccctgtccttagcaacagtaaatgccttgaaaatattttagtctcattcaactgtgttccccagggggaaaggtgcatttcaatatacaaagctgtccagacaccctaaggctgtcacaaatgactatggaaagcctcttcaactcagtaatatctgcctgaaaattacaaggcatgctatcaaagaggaaaaaaattataactgagttcaggcaacttgcttcagtgaaatcatgtctcatataacttttagctcaatgtgcttctattttgttatgggagataatgatagtggttattatttgtatcattttttttagcaatgcctctgagcaccctgtacctctgatttgtttgacagttgacatggcatgtttaaagcgcagcgaaattggcatattggctggtagataataatgcagctgtaaccggttgaattccgctgacattacgacttagaaagggaaagataactcttttctcacttcatcgcttatgattacagggtccagacagttcaggcaatatagttagtaggaatatattgtgttagtgtccccatgaggcacaccatgtcctaatggagctgtctctactgttgaaacgggttgtgctaattgtatttcataggtgcatgagggctgaataagaatacccataaaacagagaagagattgctagatctcatcatttctccctggactgattctggaaaggtgagggaaatgagtttcatctcaaatgacacctggttttcttattcccaccacagctgtgagtgaaggaccaaccacgcaacagcaacccatgctgcccccagctcagcccgaacatccgagcagtgaagaagcacccagtagaaccatccccacagcctgtgtgcggccaactcatccactccgcagctttgctaacccattactacctccacccatgagtgcaatagaaccaaaagtcccttacacaccgcttttgtctcagccaggtaagtacccgcaccacttaacaagctgctgttcttatgggtgatcactttatttataagagacattgagtaggtctagatattgagtatgtttccagtgtggcttgcccactcattgtgctcctgtttgttccttatggttgagaagaggtctgggagctgacacatgggtaattgacacaacttatttccctctagagatctgctaggcaacacttcttcacctgctgcttttaccaccaaaaaacataggtcctaatattgtaggcatttattggtgcctcacagtttatgttcaacttgtttaatgacaaaaacagatataaaaagtgttatgtcgaatgtccccaaaatataaaaagaaaataatgaagtatccaaaatataattatgagtttagtactaaaacccatatgtcaccttcattcatatattaataaggaaaacaaagcagcttaatattgtatatcagagacgcctaattatataacatcatgaaacaaaactgcaatgacactgttggttattttctcagcttgtgtcagccaggaatgtcatcatgctctcactaaaaataacagaaaaagtttacttgggccctagtttcgaaggttctagttcgtgactaattgagcctatcggaagggcagcagaatctcaaccatcctaggaatgtatggcagagcaaactgcccatctcattgtctggaattcaaggatgggaaaggaaaaaaatgacaagggtctgctagtcccctttgagtgtatggactcaataacctgaagacctttcactagacacatctcttagagttctacttcctcaaaagatcaccacactggggttcgagccttcatccaggaactttggaggcattcaaatccaaaatatggcagaggagatgatttctttaatttttttaagtaatagcatttccttgagaaaaaagacaaaatcatcatcatcttcttcatcatcatcatcatcatcttactgagaagaccctcgtcatttcctccttccccatctttgacttccaatcaacgggatgggtggtttgttctgccatgtgttcctaccaaataatccttgaatgctattttaaatgaaaggaaaacaaatagagtagagatggcacttgatttgggatctagattatggcaaccaagctgaaatctgatgctctgggataacaaacataccagaaggaatgttgggtgtccagggaacggatagtagaacagagaactggcatttttaaatcaggtattatagttttctcattaaaatgttatcaaacagactctagtacagtggagcctaaatgactgtactgtgtccttaggaatagaatcagggtcttgcactgtcccagactatatgccaacaaatcataagtagataaaacctggtggaatgccacacaaacagagccactttgcttctatctctattgtccactctgagccttttgttgtttgactattgcttccattttgtttgacttctttatcagaagccgccccttcgctcttattttctgatccttctggcttgagttcttggtttgatttgatttttttttcataattctcctttaaatgccatcttcccttcatactttctgagatgtactctaccctcactttggaattattaaatgcctttcccttttatgtttctcctttattgtctgcctgcgactcctgtgcattttataacgccttacctcatgattttcaaataagtctccctacattgctcctgacacatagtagatagtgtgctttttaaaagggctgctgtttacttattctaatagaaaaagaaaattagcagactgacaaatgtattagtggtgacattaactacatgcttcttagcccaaaagatgaaatacttagagctttcaacaaattctaattccaagaaaatcattactttagtcaaactgattgatgaagtaaagtcattctgttgtcagcttagaaaagaaaatacctcaaataattttgctctggatttcacaataaaagactgtgtaattagtaatgaatttgtctttacttactgcacataattacttcagaatatggtaatgggaggcattgctctaatttttaaagaatatgctaaaagagaagtcctctgcattgaaagcattgcgattagcatcagtgaaggcactcctctccttgataggatttcctttccgtatgtggtttttcatgagcagtgctaagggtcccagcctcaatttgcctcccactgagattacagagctgtacttgcaactgctttatatatgaggaatagggcaatacatagtatgtagaaacaatctccctgggatcacagagcgttttgcagcattgctgtggtaggtggtaattagagacgcagtctgttgtcataatgactggaattctgcctacctgcaagcatagagctattccttcattttgcccctccacatgctgagttagagatttagcttaatggaccccagggtccttatggtgtcttttgaaattttatcttgtgatgaagtgattctctaccttctagtttcacatccagggtggtgaaaaacagtgttggctttacagattccacagaacagtcattgcaccttgaaaatcacagatgtggacatattagtgacttgacttagacacttttcaggttaaatagaaaatgtttgatggaatgttgggctttttacattacaaatttcatataaattttacagaggaccaaaacagggcatggatagggtatggtgtgtgtgtgtgtgtgtgtgtatgtgtgtgttggggctgggggtgtgggggtgtgcatgtgtatgtgcacatgcatgtgtgttctatgtgtagttttcctcctgaagttcttcttagctgtaaaaggaccagcagtacttatgcagccacgagatttcctaccctagcctctttgttcccagaataatgactaggagacttaattatttataaataaatgcctagcccataagctttggctcattcctcaactagctaataacttatataaccctacatctgtcatatagttgattgcctctcctcagtttcatgcatctgaattcttctgagatcagggaaaatctcttgtctctgtctaactctcagagttccaatctctctctacaagaactcctgccttctatttcccacctcagctgataagccatctgctttttactgaccaatgatgcttccacagagtacagaaaagattctttctacatattttaaataagttcgaacggcagcctattcggcctgtggaactatcattttatgggcaaaaaccatgtagtttctcaaatactgatgtttacggtgttgtattcatagtatgaggctcctaagcacttgcatctttgttaaacaaaaggagtcctataatgcttccacttacttatctgtataaaagcccagtgcattctgatcttttcaatctttgagtgatcaatatgtcagtggacatgacaaacccaaaaaacaattcattgtatagaaaattgagtttgatttttcccctgcccactgtagcatgtctttcactttgtctgcagattgagaacaaggtgtaggtatatatggatgacagtagacagaaaaggtgtataatttatattttatggctggttgggaaatcatgtattccctttgtaacatgattttttttctggtcaggccccatttcagtaaatatgctatattataaagcagccaataacctgctttttataaattactacaatagatttcaacaccagactctcaaaccaccattgagggtgtccattaaagatgtcacctaaatgtcccaatctgacagaattggtcacaggcagaggttttgggagatcaaatatgcttgagcatgtgtcgtaaagctttcatttttagggtcagtcacagaagtcactcacacaactaaatagtcaggatgtgtggatttggtgtgtttggagccaacattgcaatcaattgtaggcaggaaaattacaccaactcccaataaatacatttcctttcatgtcaagtcccacctgtgtttttaacaagcatcttgagattttcttgtcctcacttaaaacagattttgtttaataaatgaattttgatcagaaatgacctcatcatcctaaattattctttattaaaatgtaatgagacaacttttcttaaatatagtatttgtcaccctgttaacctacttggtgtttattgtggaaaatactaattttctgtcaactggtgttctgacatgtaaataggacagaggtctgttaacggtcttaaaaacaggatcattttttcaaagatttaatatgtgatccatgggattgatgtctcatttattgatgataaaactgagagttgaaaaggttatagattttccccatgctcaaaaactgagtttgaaatcagacttcaaaatttcaaaaaaataaaataaccttggttagaaataagtgttttcttttttttttttttcagttagcttcacagatattcttaggttgatttctttccactacaaagacctctccaggttgaggctagatactaaatattcctaaggaaaaatgtagcagataagataatatttagattagttttagcatagttgatatcataatgtattcatttactattgtgtgagtgttcctatagtgtgtgtgtgtgtgcatacacacttatgtgtatatgtatgatgctatatgtgtgtccatgataccaaagcacacatgtgaaagccattcattcatgaagtgggttatctccttcacctttctgtgggacccagggatccattcattcatgaagtgggttatctccttcacctttctgtgggatccagggatcaaacttgagctgccaaccttgtttacagagctcactgggcaaccctcttttatcaccgccagatacttactgcttcctggctccattactgaaacggtgatgttttagtatccacgctgctattagataggaaacggaactgagagcaagaatcctaactctccaggcaactctgaaaccatggccatttatcctaacttcacccacccgttccaatcgccaggcatccctctgcagtatgacagaaagccaggcccttgcatcttttgctatcctaatgacaagagctttaaaaatccagcacgcaaaacttttatgaccagaaagacatgaagaaggaaaatcgaaattaagacacggtaatattatacatactgtcagagagagagcatgacagaagaccaagacagcagtacacacacaacaaaagctaatcaggattacaaaaattacttttaggggtttaaggaagtgatccctgagtcaaacttttaatcccttccgtcaagttttctcaatgaaaaaaaaagaggaaaaaaatattttatcaagaatatttagagcatatgtaaacctgaaattaacagtcagtttaatataattaacgtctaaattaacaaaatgccatgtaagtagtcataagagacaattaaagaggtctgtgctcaaaacctggctaactttgtgaatgggatcatttaaaacatggaaggtttggaagcttgttcttggattgtactgcagagtcattgtctcctgggagacagagaatggtggcaacacaatgggcagcagttactttcaaagtatgcaatcctttggcatatcttatgcacaaactggtcatgcgcttaagctctcatgagtgcattgtattgattttggaaaatgtcttggaaatcacaaagttttatatatatatataaagtcagtttatggaacatgaataaacttactactttacatattataagtgtttataattcataaagaatgccactaagcaaattcatgtttaactgcaaagcaactacaaacaaccaggaggggagcagggcaaccttataaccgttccagaatgctgaggcattattcttgacgtcttcatccagactcgtagatgcaatgaatcctcaattaactgtttagtttgttggagtaaaattatataaaatggcaccagatttttgaatacccttcatcaatttcaagcctaatgaaagtatgacaacttgagagttaatggatggatgagatatttattagtaataaaggcagataaaaatgaagcaacttccaaatttgggacaatttggtggtcctaaaatatagaacaagctcaacaagtttcatcttatactacaagtagttcatatatccatactgagtgaaaacaacaacgtgaagccacaggtccagaaccttctcctgactaagtcacttttgtgaaaattagcaggcacgccatggtccctgtgtaatccaatagagaggatcaggatccactgtgttttgacaggagaaagggtcagtccatggaagctggtgaaccccgtgatgtttctcctctgacatctactttgctcgtgtgtgagattagataaccttctttaagaacagagtataggtcctttccctttgattaaagaaagaacaaaattaagggaatgcttctagtttgattaaggatttcaaactctagttcagcagttcagaggtcatggtgccataaattcctgttccaaggagtnnnnnnnnnnnnnnnnnnnnnnnnnnnnnnnnnnnnnnnnnnnnnnnnnnnnnnnnnnnnnnnnnnnnnnnnnnnnnnnnnnnnnnnnnnntgggaatctgcacacatggtattcactcatgtacccttaaaaacgtcacacacacacacacacacacacacacacacacacacacacacacatattaaatcatgaatcttaaaagattctaaacattattgccagtaatcccagccgtgtaagtagttgatagatcattattttagttcatcagttcgtgtcagattcaagaactttctttgaaggtatgggaaaggtcaagagaggtttcatactaacctcctactaacggactgttgaatacatgttatgcaaaaactaacactgaaaataaacaaagggattatgtgttaaaatgaattgaatttatcagcaagctatagtgataagacagataatatagcaaaaattgtgtaaaaatttgtgtcagacccaatgataatttacaaaggttttcttgcaggcagggccttgtagagaatgtattaccccaatagacatcttgagaatttgtgaacattgactttcaacttcagcaaccaggaggattgatgtccttgtttccagaatctctgtcaccagaatgcttaggctttcaaaggacagtgtctttttatcttttgtagcaaaggggattctacgattctctgtgtgtgtgtgtgtgtgtgtgtgtgtgtgtgtgtgtgtgtgtatgtgtgtatgtgtgtgtgtatcagtgtgtgtgtgagtgtatgtgtgtgtgtgtatgtgtgtgtgtgtgtgtgtatgtgtgtgtgagtgtatgtgtgcgtgtgagtgtgtgtgtgtatgtgtgtgtgtgagtgtgtgtgtgtgtgtatgtgtgtgtgtgagtgtgtgtgtgtgtgagtgtatgtgtgtgtgtgtgtgtatgtgtgtgtgtgtgtatgtgtgtgtgtatgtgtgtatgtgtgtgtgtgtgtgtgggtgtgtgtgtgtgtgagtgtgtttgtgtgtgtgtgtgagtgtatgtgtgtgtgtgtatgtgtgtgtgtgtgtgtgtgtgtgtgagtgtgtgtgtgtgtgtgtgtgtgtgtgtgtgtgaatttctgtgataagcaaaccactgattttgaataagaggcatattacaacatgattgtacatgccatcttatagaagtaatgagattgaaatcgctgcccttttcaatgtcttttctaaattgctgccttaaatatctttctttcacacccctgattcttttacttggtaagttttatgcacctttctatttacgtagtcagcagctcatcccttcctaataaggcttggattcatgcattttgcaaaccacaggaatatgcaaacccgggctgcttttaaaatcaggaattgcaggttaacttttagttcccctcctcgttacactcaaaattacagtctgtgttggttttatctttgaaatgctctattctcaacaacaacaacaacaaagactgtgctgcacaatcaagacttagctgacaccatgcttggtgtagaaaacatagagggacagtttaaataaaagtactgactgagaaacaaacaactaaccccatcccctataccccccaaccctctgacactgaggcccaggatccctcctgactacctaggctattgaatgtcatttaaattctttatgcttccactttcacaccacaactagataaactaaattctaacctggaaaggtatcactgtacaactttaggaaataaaatatattaacatgagttatgcttataaaattatactatttaagttagaaacttctgatctggtattacgcagaggctctgtcacctcatacactggtatttagtatttaataaatatgtttatttaaataaacttgtatgtttaatgtaatttaataatatttgttaaatttttatattatatttatattaaataactatatttcaaataaatacttaataaaaatagtatttaattacatatctggtcaaacatgagctaatttgtgaaatattatattctcctgtatatatttgcaggatataatggccaccattatatgtatattatatatagtgaaatggatcaccacacggaactcaaaatagtgaatagaatacctcagagctttctgaacatattacctgactttacagtgatctgttgtctcatccattagaacaggactcactctgaaaccatcaatccatccaacagccagaaagttggcctctgttgcaacagtgtagattccagtaagaccttacctcttgcactgtggcaaatctgattggaacatgtctgcctacctggctttgtaagcattgcatctctctgaaatggtcctgtaggaaaccaaagataatctttttaacattagtagcatcccccaatcccagatcaaactcaggttcttctctgcagtgaaaataacaaggcagaggttacagaagttacagagaggttacagaagtgaggagcagtagtcaatgattgagaaatggagtaaaggggtgttttcacactgaacatgtatgaaatactagacgcatcttccctctgattcacaaacagcataacttgttactatgatattggaatatttctgaacgtgaattgagatgcaattgaattctatattcttcgtggatatttctttctgtagcagtgagtttaaaatttcatgtgttagggaatcacgtgcaaatctttttcagatacaggttctgatttaggggaactggagaagaccccaacattttgatctaccaatggtattctaggtggtgtgatggctgccactctgtggtttacactttgaagtagttttaatttagaacagagtgtgtgctcctaagcagcagacgttataactcacttgaaagctctctctctctctctctctctctctctctctctctgtcccctctctctctttgtgtgtgtgtgtgtgtgtgtgtgtgtgtgtgtgtgtgtgtgtgagagagagagagagagagagagagagagagagagagagaaagagagagagagggagggagggagggnnnnnnnnnnnnnnnnnnnnggagaattgtacagacacatatggtttgtacccgcagtttcagaaccatataaactgtgttcatagctttcttagagtctcacattgttcattgtatgtaacagtttagaggtcacttgccctaccttattcatcacaccctatataggctcaggtatagaacagcatccccaaggtctgcttttcttggttgtgatttttgcacctatttgtgtgtttgttcttatttaatgtgtgagtggatctaaagtatttttttatttattttattttaactaagacacctttccatagcctaggaccaagagctgagtactttccctttgctcaaaattgctgaaaaatcaaaattttcattttccatatagacactccccaaattatacacattttcagtgacttctaagagcattaatatgattaatgtacatatatatccttgaaaagttctactccccaaaatgtctcttatttcactatataactgaagatggaatgatcaaaaatttaaaattttctataggaacttttctacagaagatgaattcctgtgataagctgggaagtttcttgtcattttggagttggccataatgtctcctagatttcccatgttcccatggtacaatgaagggcacctatcacaacactgactgatttatatgcatagtgactcagggctcaataaaaacttccaattcactcagtgtcatacctggtgaatatcatatgtaaactataaaataaattaggatacttttctggtgttaatgagtgtaattgaacctataaagggtgatagtaaattcaaagcaaacaggaggtaattaaaagtaatgtttatgtaagtaataatgaaatgaaattacataatttccctaaaggtgttatcataattaatgatttaatataaaatacatctaagaagtaaatatgttttcaagggggtttgtgataaaaatagtttgggagaaagattttttaactgtttctttaataactgctttagaaataaaatactttcttcctttagtcttttattctttcttctcttttatcattttattctcttattgcttgattctttatgctctctccttcttcctgatccctcttctgtcatccagatgtcacatatcctttaattggttcccagattctaaattcagaaagtagtaggtcctgcactcaaagcagctgacaataagggacggtatatatgtaaaacactccatactgcagaggaacagtggtagaccatgggaagtacaaatggaaattgctaaaagttgatttttttttctaaattcctttgatgactttaatgtcagggaatttttttaataatggagtatctttgattcctttgactcaaatgtctataattagacataggcttcttttggaggatctgaaagttccagtaaaaaaatcatgaccacctctgagacagcttccctacctatctgtccttccctacctgcaggtgacaaacaataagttggtctgattcttccatgtctctaagctcagtttttaatggtttactaatcctgtgtgtagtatgatcataaagaaatatttcattcctctggcacatcttttaaaaataacatttaatagcacagaaatgcatgttctcaattttctttagtattatagcaatgtctaacatgtactaaaccccactagatactaaagtaaaaagtgaattaattctaactatatcagtgaggtggctcttcagactttcttactggagattgtcactatggaacacaccactctaaattcctacacttattcatgctttagaaaagcataaatggaaaaatactcctctcagtgcatattacccaaattattttattattttttgaaatgtttctaatagtctacggtattgtagcttctgtatttgtagataaaagacaataacaaaagtgccccagattttgctcaggtttggttccatgacaaactgtttacattgccattaaagtttgttctgtgatctgtttatttgtggtgttctttcccaatgggcacagggatcaagcaacagttacttgggtctcaccttcctccgatataattattcccttataataggttttattttcttatttgaatgctaagtaagttttcatggagatgtttttagaaagtaacaaggataagatgaattcatttctaaactcagaattggcttccaatctttgtagaagaaaaggaatatttgggaaatccaagtgggaggatgtactgagtaatgaagagtttattaagcatcatatagagacatattttccccattagtaactcaccatgcatagacttaagaggcctactctcagctggtactaaaagaaggggttgacatttttcattgactcctacttgcaatacaaacaggaaaaactgaactctcaacaggccaggcttttagagaatccagctttggtaaatgacaattctggtagctcactataaaaagagaaaccattttgtaatagagacatgctcattagtagctaattctctgttagctatacacaccaagcagcttggcactttgcacatgctgtgtctctgtattgaccagcaactgtaaagtaaaccatgccgttctgcctgataagaacctagagcgagctctgagaacttaaactgtgaccattgtcactaaacagctgaggcagaagataatctcatcctggacggcatcgctgtgaatcctactcccagattgctgggcaagaacaaaactttatcaggaaggtctggcaatggcatttatacatgtataggtatagtcttaccagagagtgttatttccagggaataatgagtttatacactgggaaaaggcagaatgtgataaatgacaactgagttgttaaggaatgtcaaatagcaaaccaagaatgagagtttttaaaagtaccatgatgaatgaatggaaactttgaatcagggcagagtgagatttatcttttagaagcagaaatatttgaatagtaaataactagatgttaggaaaatgagacccaaatgactacaggttggtccttgtgtctttgggatgtataaactaacagaaaaaaaaatgaagtagtagaaaaggttgccttgcaaggagaaagaactttgaggataatgagacagtgcgagtgtccaggagaaaatctactatgtgtagggagagatgcagcattcaagggggcagtcagagctgaagtggtagctcagagagtgatcttcagaaagtgagtatttcaatagctaatgactagaataacatggcagctcttaggaaaacaacctgaaggaaaaatctaagtttcaatactaacctaggacaaatgttcattttgtggcagagcaaaaagaagtccaaaacataagacaatgctactgcaatttcccagaaaccgagatacaggaacatttcaagaaaacagccattataaatagtagttccttcaagcaaagataccataatttggaatatttcttacaaaattttattagaaaagtatttaccaaactaaagatgtattaaagagccagaaggaaatctgataaacggtaagctaattcaaaattaaacatttaaaaaggcgtttgaatgcaggtaccctgtgtgcgtagataaagctattccctgaagccatagttgattacatgaaagtacaatgtcatgggtgaactgcctcccgatgagctctgttcaggaaagcagccaaggctctcaaaacaattcagaaaattgtcactgatgtttcatgcatgctacgaccttacagtcaaaaaaaaaaatactgtatgctatgactacacaatataaaacattcatcaggaccaaagctagaagtgcctttcctactgccagccctcgtagtattagaaagttctatggaagatgctgaagggaagaagtcttcaacagtctactgtagaccctgcacagtcatgactgagctgacatgcaagatgtgcactgatgcttagtggtcattcttttaggtgacagccaatcacaaatgattggattaggtgcctgttcctcaggaatggattcatatctggtattgcaaatttagccattgatttctccgtggctgggtaatttacagatgctagggatgaacggttgttctgttaaacagacatgatgtgtctactgaattgccttataaattgctgtttatcgcctgaggttagtgctactgtcagcttagatcagacaaacttttgttttacagaggccataggtaactgcaaagactcatagctgctcaaaattgtgggaatacatgactatttataaatgagacatgcgtatcattcctttcaagatttgaggaacataatagaagagggtgtagacaggaagtgagagacagaagataagacagaatattatagaaggcagttttctgcaaataacactttaaacctccccagctgcagaacatgaataggacctgaacaatattaggcctgccaatatcctctcattaactgggtaggagctcactgagaacattgtagaaaagtgggtggaaatattctaatagctagaagatcgtagagttttctgtgagcctgtgtttcatagtaatttcagaagctacatccataaaaatctcaatatttactagactttacatctataaggagatttctgacatacatatatacacatatatacacctacagtcctgtagtctagggaaggtaaaaactaagaagctgagagaattgtaacatgcaagtgtagaccattccttagggtgaatagttacaaaacacagaaagttgttcaatgtagacaaaagcaaagcttataccagctatttccacactgatctttggcattcaaagggtgaggttttttttttaatttgctactcttatatttgaaaatatttttaaaacacataaccaaacattattgactaatacagattctgtgaaaattttagtatcctttaaaaattaatatgtataatgagtttgggtcaattaaagaaatacacatataaaactcgaagtgattgaattaaggtgtcaatgtgccattcaaaacctggtgtgcaaatctattaatgtgagtgtgtgtgtgtgtgtctatgtgtgtgcatctatgttctttgttgtgttccattgaacaatgaagccaaagtaaaatcaattatttcacaatgttaagaaatcaagatcttgtgagtcaagagtacaaggcaaaacaaagactccatggtaatctgtttttctttataaagaaaattaattcagcgtacacacagtaatgtgaattctgaaaattaaaaattattatcttaaactacacatgaaatatttaccacgagcattatctactgtgtgctactataaataatttagtataaaaattacattctatatcaagtatacagttaataaagttataagaggctgaagtatgggtatctacatgtttctgcatttaaaactattttactaaattatattgatagagttgcaatattacttatctatgaattgagattttgatgtttctgaagttttatcactagaatatggacaaaacatagacattgaaaaaaatgtttcatgaataaaaaaattgatcattttcctaagcaatgtacaaaataaatgaatcagaatgactctatattattaagtgaatttttttgattcttgttgcaatattcaacaggactaggaaaaaaataaagaatttatttgagcagaagaaagaaatgtcccttttataccaaataactcaggatatttcctaaactaactgaggtgaatcttgatgtgacactgtaaaaagcgataaactgcagaaagccaaggcgggagccttaaagagagtaatatccggcctgtgaaatgatcatcggtctttagacctgatgactaattaattaagtgccattaaaaagaccagtagcagattgtgcattttctgttgctatttttatcaactgggtattttttgtgactttgaattgggaaccacagaaaagtaccagaaaaggggtgggcataaaatagctcagatgaatctacttctcaagatctttgcagatttccttgaatcatgattcctatgaagctgctcatgaagaaaccaggataatggctggtataaactttctgcagtctcatcagcttcttgctggttttgtccaccttgattttatagatggggagccttccatcaaagcacagggttggcccggctccctgtgagtcaggcactgggcaaatcccaaggacacaaacagattgcacattgatctgtccttgaggatttctttcctacctgtgctttgccattatttcccagcataaattttataccagggctgttcaacaagcttagctcctttcaaatctttaaaatcaccctaaggttcaagcttatccattaaaaaaatgcaaaataaacacctctcatatctaggagctctgcagttgaaaagatacctgggaccgtacttagactcatgtttccagtaagattggtcagtctattttctctactattttgaagacctgggctctttgttcattctgtttgtttgttcattttttgtttttgttttcagttactattacataacccttcatttgcctggtgaattcggtacttagattccaatattgcaaaggtggggccatagactaaccataagggtatgttttcattaagatgttttattagatgcctactaagtaactacagaatagttaaatcatttattgtagtagtagctctttgtgcagacagaggaagatggacctggaaaataaggcatcgccattctatttgagagctataggaggaagaaaaacatcacttaaaaaggtaggtgtgacgggaaaaggaaaatctttcagtccttcatctcacccttctgggcacttatcattaaattcaagtgcatcaaggcagttggagaatgatgagtgatttgccattggttgcattactgtatcattactgtcttggggggaaaatatgacttagagtttccggtatttagtgtgtagaaaggaagtggaaaatgatggggcaagagaatggggagaagtgcctgaaaggcgagaaaggatgcaactaaaggacaagtatgtgcagacagctttggtgtgcatttttccaatgaagaccatcgcacaaaacctgtttcacatactctttagagttctccatttcgttaatgctaagatgttttctccattataccagaacagaactagctagaatacagaaagaaggggacacccacaggactacagcagcaaagcaccactctactatgaatcatgtctttgcttgcatttccagtgaccagagagaccagagagcaggaatctgtagtatttattaccatcctttcttctgactctccctctgacacaccaccaccatgctgccctcttcctgcctcccattttagtctctccttcatgccccaaggttgcttggtttgttctctgtgatttctagttatgtattcttggttaactcttagattatttttatccatgaaagaaaatagattttcataggaggaaatccttaaaccctgacactagttgaatagatgcaagcattcccttgccttctgtgcactttgattttcttgtctccaagacaacacaataaaggatgctttggaagtctcttttaaggaacatagaagaaaatgtgaggaagtgtggggatcatagtttctgtacctccaagcagagacactagcacctaagtctttcctctggatcctggcgcatagacaaaatagaaataaagcactaaagaccaaatgcaaccccagtagactatggccatctggaacaatgagggagggatgactagaactcctccttcctctcctgccaggtgactactgacttactctactggagtcaggcctttgtagtggcttaataaacacactctccacaattggagatctctatgtcaataacatggagagttaagacctggagcagtgacctttgctacatcaatgctatcatatgacaacattcttacttgttgtaactccttttacttaggataatttactagggtcgagaggcacgaccccttgtcagcacactccctgttatatgtttccatcaccgaggagaaataggattatttgaagagaaaaagcctttccttagtaaaactatactttggatgctcattaatcttacagtgcaatccatgctgctgtgttgtgtagtcaaatgccttaagacctagacaaaaaaaccttcatgtttgaaactaggccactgcttgtaaggaattcttctggctcttgtatacaagctaatatagcttttcactttctctttgtaatatttcgccaacataaaattgtaaagaatgagaatatacagtctcccatacatagttcacatttctcccatagtaccaaacctcctcccatatgagatatacaggagactttacaacaccttcgtcatccttagatgacatgagcagactgattactttaaaatatggacatagcagaataagtttcacatcaaaaccagacagtaagagaccatttctgttgccactttcgaataggtgcgagacaaaggagaatcaattgttcttcaatcttattcagaaaaaaatgaaagaatgggagctagagatggctacatggagaaaatagggaagactattaaagttaaagctaagatcggacccagggtgcactgcagcctctgatccacccgaggagagtctgtgcaatgcattcctactgcagtccagtttggtgtttctcaacatagaaagtattgtgcttgcgaacaacttctgcaagaaagccctagcaggaggctgcacctggccatcatatattatgtacctaatgagcaaatgaaatgtttaataactacactgtggaaataaagcttagaacagtaaatgcctgctgtggctcttcatctttcccggatgcacactgatggcccatcgcaaagctccaatatcatttgtattttcctgcttagtgggtcctgctgaggaaacaacattaaaaccaaagcgatgctcacttaattagttgtataaccatgtaaaaagcatttatttaacatagcagcttccggtgttgcaccgagggtctcctgaagtgcttctccagcatgcaccccaggcacagaaatttgtgcagtggcttcaactgaagcatttgcaaattgaaacatttcaattaaccatggatcatttagactcatagaaatttaatactgtgttattttacttaacttatagtgtgaagaataaaaagcaaaaaaaaaatgagcataagtgttgtggtaggtttttattaatgatttttagaaaagaatatttttttcctataaagcaccagtttaagggcaaactgttatcacttatgttaaggtttataagtttataagttgatgagaaatgcatattggaatacatttttattaatgtattatcgaatgttttctaatttagttttattatgttttctaattttgctttacttttgtattttgtttactgagtcagagttcagtgcttggttggctagaatggctttgaatgttcagtagtcttactgtactgggcttagagatacttgtctgctcacatgcttgtcacattctttctaaatctcaagagatgcaagccattaaatagaaagtttaattgggaaggcttgggtttaggaaggagcccccggaagagttaaaaacaggggagtgaaaagacaatttaaacaaaataaaatttactccccaacaaatgaattaaaaataaaataaactcttagaacaccgagttattaaaaagcagaaataaaatgaaatgcaggcaagatagctgtattagattttcatatcattttataggttataatctaaagaacagattacttggttttgatagatatgaggaaatcaagagtcaaagaaattaagctatcagagtaattaatgttactgttttatagcataaatatctgtccctcaaaaggtatctgttttaacatcttcctggtttgactgtatcactactgggaattgatgaaacacatgaaaagcaggacctcctcaaagaaagatagttcagtctaggtcatcccctggcaagatctactgagctcattggctccttcctgtctctattctgcacttgcatcctgtgtataatgttagaagtacttttctgccaccccctcccaccacgatatactgcttcaatataggtttgaaaacagtaaaatcgagtgaccatatactaaagtcttttaaaacctgaggcaaaaataaagttccttgccctttaagttggctttcctaggcatttgttatagtagcattagctatgaaatcttctcaccgagtgtgagcatttgccaggacttcattttatagattacattcattgacttgggaaaaataatacagcaacttcaaaatccttcatttcatgcataaattagtggtttctggttgggaatcccccgtttctcctcacctaaaggcaagcagatgagttcttccagttcttctagttcctccagttcttcttctcacttgttcctcacttcatgtgtgtttatttctccctcccaaagcaagaggcctcttcttgctcacattcggaaagtcattccttacctttgcaccagagcttagagcatgttgactataagattaagattatattacattagcagctcagatcaatggaaggatttcttttgatatttatctttgattttgctttgatagcattgctcgggtttaactcatacaagtttcattgaaattgtgtatgcataatccaattatcaaagtaactgctacctcctacctcaaagaaataaacatgaagtcatctctgtaagcaacagccaggatctgccaccttccataaaatagtaagagctttgtcatctccagacattgacaaacaagagttcaacataccggtgaaatggtttattttctactcgttcctgtttctgcctttaaaatgctttaaaagagtgggccatatccctctttggtttgtcaaaaatggccattgtggtctgtgtgtctggcccaagtgtttccaggttcttagcctcttcagagattaatctaaggttttacatgaattttgggagcatagtttatccaaagtaaagaaatgggatagattagaaatacactttcaagattgacaatcagccacatgaacatgggtgctcaaggaatcctgactatttgggggggtctttctcttatggcgctcaagaaaacagtttagtttctaatgccacatttttacattaatttaacccagatccagtagggttgtaccaactaggtggacatatcatcacgtttggttatctgaatctcagttgtatgcatcaatgttagtggaatgtctatcatgcataacacttcagtggatgtgatcattaacagtggcttcctatgttactctcctgcataaaaatgcttgtcctatatgttctatactttcttgtacagaaagttatgtagtatacatataggtgaggccatatttgtatccatctctggaaggcttgctccctagcaaatctacctgccaatttctcatggggaagggtgatttgtgtatatgtcccatcaagaaatccatttatcagtgtcataatagaaaataggaactatatttcagcagcatgcaaaatactaaataattagcagaaatgcaaataaccttaaatattccccaacctatattgattctcctatgatcagacatcatttgtatctcgtaggaagcttccaaagctagctatgaggaaatggtccctactttgataagaacgtctgcttcctgatttccaggaagacttaatgggctgtggtctaccacatggaaaaccaccagaggttcttcaagttgaactctgttatatattactttacgcatttgttgtccccatggggaccaactcagccctgcccagcctctttttgactgagccatctatgaagagaagcttctaaattcagcctatcgagacagatgatcattggccgagttacaatccacagtgctcttaactcagctcattgacaactatttccagccacatgtcatctgtgttcatttgtattactctagcttacaattttgtttggtatgcctactagtacgaaccatccgtgtatcaggcatgataacccttctgctatttttctggcatgcctgttttttaaattactgggggacactcattggattgaaagcaccgtgatcctaagacagcctgcctggcattggagatgaggcttgatgacatcacacatcattgctggtagtatgcatgccgtgcttgtaggcttccatggtatgctacactagaaagcgttttggccagaaggccttcaaagtagacacttgtcaattaagctgtttttatagtcacagaggtagaatgagttaaggattccacttgttgcaatgctttacatgctactcagagttgctcttcaggtgctgtgcatggcccttctgatcttttccttgactgagaccaaaatccaattggaattggttgttctttccataatccctagccatagcctgctggacccctggtgacatgatataggaagggacattgtagtagtggggcacattgctgtttagcatgtcctatcaggatcttaacatgctcaaaacctacttgaggctttatgtcccaatcccatagaaaaattttctttattaggttaagaggagggatttcttgagcaagatgggataagaaatttctccaatgtcctaagagcccttaaaatatctataagacttttccatttacaggttattacaggattttgataataacattttcaggaatcagacacgttttctgaattataatactcaacagtattatagtaatggcaggcccttgctacatgtgtggattattcccctccccccattaaccttatatccttcagatgcatttctagatctgcaaaaaagactcagaagttcgcattatatcatttatgtaatgacagatgttttaaagagggcgagcaggctaacaaagcaagaccctgggcagccattctaaaacaaacagtaggtctacaaacttagcctttcaagagtactctgaaggtccactgatgaccactccacacaaataatctgacagccatgcagtgtttacaaagtagataccaaagccttgtctgcaaaggaaatgcaggaaaccttaacatggaggaatgagctcaggttaaacagaggcagtacatcagcagttgagaggcagcagaacggctttctgtgaaatgtctttagtttaggcaaagtccctaggctccactcactaacgtaaatgccagattgcactcctgtttcacttcaaaatggtacatgccacaagactagttattttatataaagatgtatgttcggttccaatgcagtagaagatggagtcagaatgttgcccttggggaaggcgacgggtaacctgtaagatacacagtaaagaatcagttctgacatgtagccccgtagatgactagggatacaaactagacaatcgaatcagaaagcaattgctcagtgagcttcagatactttcacaaaaggtaaagcccagcttgctgagctttcagggactcaagacttctggggtccaacttaaaatatctgacgttcaaagcagaaaattctaaagctgatgacatagttagagagcacaggcacagaattaacacacactcagaagagaggggtcagcttcccagaacagaagctttcgtagccatctctgatggatgatatctcctgtaactaaagagtaggggttttgtttcttttgttttgttttgtttttacgttttaatgattctttgtgagtctcacaacatacaccccaatcccactcattccccccactgcctcatagcagcccttggcactgacagtctctttcccaataggatgtaaaattacacacacacacacacacacacacacacacacacacacacacaaataaacaaaagaaaagaatacaaagtatagaaaacatctcatcctggaatctgtagtgtttcaaagtgtgtcccatcagtacatccttatgcacaagttatcattacaatgagtcattggtctggtctgaagtctctggcttcctgtcacaccatcattagatcctccacttggacttctggttttcctgttgttgccctgtgatgtggagatcacagcaggatggaccctttcatagttcacagatgatgtagacttgggggtcggccaactcaaagccatggatcttgacctgggtgataaccaatctatttttcctgcctgttctccagtaccctagccagcagggcagagctctctagcactgctagactaggccaccagatgccaccattggcaggaggcagggccagctctcctgctctcatatccttgagactggctcatgcatgccatcgccatcaggatccgttccactgtgtttctctggcaaggtggatggcctcctgtgctcccgcacttgaggacaagctcacttgggtcccctgtaccagggccagctccaccaggcaaagtggggagttggctcttgctctctcgagtgctgtaatctctggtttctcttcagactatatcaattgtttaccttttacttaagagtagttttgatgttaatattgtctaattgcctgttagtaaatcactcctgggaaattttccttatgtgcacatctttaactcttccttatcgtatggaaagaaaaagaatgcaaagccactaattacaccggtcaaagtctgtcaatcagctgggaaactgctcaaattcgttgcttgtgtgaattttgtgaagattagttttaccccagtgaattggtttctaaggagctcgggttccttttagcaaaacgaaaaggaaggtcactgaatggaatccaggccctaagatgttccagagttccgaacatttatgaagctgtggtagttttacagaaaaggaagtctgctgagatttacacactccctgtggtatgggtccaagttttcttaggtcccttgtacaacagtgcattttgtattgttattacttaagatttagtacatcttgaaagaatgaataattgtcacctcatcactagagaaaatcacttatcatagtgatcttacttttttaacgagtatgaatgaaggtagtctctaggcacacctgttttgtagtataatatattaatatggcaaatggtgtctaatacatcaagcatctggccatgtgttaggtaagaatatttctatagcaacaatggtaggccgtgcttaagcatcacattttctacacatacaaagcttccaaaaaatgcactaaggtaaatattaaggatgatgggaatgatgatgagctggtaaattcgaaaagaatattcattatgtatgtttcttcttgcaaaataagaattggccctgctacagtttcctctgtgtaaagctaagcccctttgtttctctggtggaccgatttgcattttctttgtaaatacctacattaacgagaacatattttcagtgtgtactggccatattgcatgtatctggtaaaggtcacagacctaaagtttctttaaaacatgtggaaaaccttaaaaaataggagcaaatctcttgttcttatctagaaagtctagattacaaacagagaaataggtataactaagtacatagaaagaagaatcatcaggatgtatgaaacatactaaggtatcaagacagaaaaggtgcccttatggtgagggtactgcttttgtgggaataaaagctaaactcagatatacccagaacctggaaacctttctaagaagataaataaacagttcagagaaggtagctcagagcaggaatgcagcagctgcatcccttctcaagttcaatagcagtttgcgtttgaactattagtttgactaggcttcttgtttgttctgttttttctttgtctgtttgatgtttggatggcagagtcctaacgtcttctgtgtctgaatcttgagagagggggttaggggatgtagtggctattcctggttgtcaacttgacaatatttggaatgaactacaatccggaattggaaggctcaccagtgacccttatctggaggcttggagatccttatctggatcttggtttgaagatcttgagccatagtggctatggattccagaagattgaatctccgagttaaggaacacacctttaatctgggctatgcctttcatctgggattaaaggtgtggtggaacacacctttaatctgggctacaccttttgctggagacaatataaggacattggaagaagggagtctagctcttgctcttgctccttcgcctgcttgccgtgtgagactgagtaactgctagatccttggatttccattcacagctgcgactgaacaattgtaaggaattgggctgccgactgtaagttatcaataaattcctttactaactagagactatccgtaagttctgtgactctagagaaccctgactaatacagaagttggtaccaggagtggttctagagtaacagaagtacaaggatgaatcttttaaaattctggaattggcttgttgatccaccagcactttcaactattgaaaactctccagattctctccctcctgggagctcagagaattttgaagacccatggttgaaactatattccgaacttaaagaagctaatgcccttgattttcttaatgaattaggtgattcagtgcacaaagctttctacaagatggggaaaaaatcgaaaaatgattttactggctggctgctcttagtatctgtggaaaaaatgatgaatgaaaggaaggagttgtgtgataaaatcgaaaggctccagacacaagtaaacgatctaaaagttgctaagtgtgtccttgaggagaatcttctctcttgtagcaatagagctcaagttgcagaaaatcaaacagaaactctcattgtaaggttggctgaactacagagaaaattcaagtctcagcctcagagtgtgtcgacagttaaagtaagggctctaattggcaaagaatgggatcctacaacatgggacggggatgtgtgggaagaccatgttgaagctgagaattttgaatcctcagattctcaagggtttgccccacctgaggaagtagtaccctcagccccacctcttgaaataatgccttccccacatgaggaaattaattttgcagagtctgctcacggcccaccaatagtttcttctagacctgtaaccagactcaaagcaaaacaggctcctagaggggaggtagaaagtatagtccatgaggaaattcgctacactactaaggagcttaatgagtttgctaattcattcaagcagaaacctggtgaatatgtgtgggaatggattttaagggtgtgggataagggtggaaggaacataaaactagagcaggctgagtttattgacatgggtcctctgagtagagattctaggtttaatacggaagctcgcatagttaaaaaaggtgtcaaaagtttgtttgaatggttggctgaggtgtttatcaaaagatggcctactggaaatgacttggagatgcctgatattccgtggcttagtgttgatgaagggattttaagacttagggaaattgcaatgctagagtggatatattgtgtaaagcataattgtccacaatgggaaggtccagaagatatgcctttcaccagctctataagacgcaaattggtgagaggggcaccagcacatttgaagggttttgttctttcccttttccttgtgccagatcttagcattggagatgcttctgctcaattagatgaattaaattcactgggtttagttggatcccgaggtaacaagggccaggtggcagcattgaatcgccggagacaaggtgatcctagttattataatggacagcatagacaaaagaatgtttataataacatacccagtaatggtcagcacaggagaggtgaaatttataatggcatgactcgcttggacctttggtactggctaatcaatcatggtgtttccaggaatgaaatacataggaagcctactgcatatttgtttgatctgtataagcagaaaaattctcaaacaaatgaaagaaaggctacattagatcgtggtaaacagcaatctcggccagtgaatcaatttccagacttgagacagtttgcagatccggaaccccttgaatgaaggggtggccaggttcctctgaggaaggatcttgataagacactcaaaggttttgctgttaccctttctccagttcttccccagagggacctacggccttttacaagggtaactgtacactggggaaaaggaaataatcagacttttcggggtctgctggatactggttctgagttgacactgatcccaggggatcccaagaaacattgtggccctccagttaaagtaggggcttatggagggcaggtgattaatggagttttgactgatgtccgactcacagtaggtccagtaggtccccggacacatcctgtggtgatttccccagttccagaatgtataattgggatagatatactcagaaattggcagaattctcatattggttccctgaactgtagagtgagggctattatggttggaaaggccaaatggaagcctttagagttgcctctgccaaagaaaatagtgaatcaaaaacagtatcgtattcctggaggaattgcagaaattactgccactatcaaggacttgaaagatgcaggggtggtggttcccaccacatctccatttaactctcctatctggccagtgcagaaaacagatggatcatggagaatgacagttgattaccgaaaactaaatcaggtagtaactccaattgcannnnnnnnnnnnnnnnnnnnatttgctttcagttggcaaggccaacagtataccttcacagttttgcctcaaggactatattaactctcctgccctgtgtcataatttagttagaagggatcttgatcgtttggatcttccacaaaatatcacattggtgcactatattgatgacattatgctgattggaccaagtgagcaggaagtagcaaccactttggactcattggtaacacatatgcgtaccagaggatgggaaataaatccaaccaaaattcaaggaccatctacctcagtgaaattcttaggagtccagtggtgtggggcatgcagagatattccttctaaggtaaaagataagttattgcacctggcccctcctacaaccaagaaagaagcacaacgtttagtgggtctatttggattctggagacaacacatccctcacttgggtgtgttacttaggcctatttaccaagtgactcggaaagctgctagctttgtgtggggcctggaacaggagaaggcccttcaacaggtccaggctgctgtgcaggctgctctaccacttggaccatatgacccagcagacccgatggtacttgaggtgtctgtggctgatagagatgctgtttggagcctctggcaggcccctgtaggtgaatcacagaaaaggcctttgggattttggagcaaagctctaccatcatctgcagacaactattctccctttgaaaaacagctcttggcctgctattgggccttagtggaaactgaacgtctgacaataggacaccaagtcactatgcgacctgaactacccatcatgagctgggtactatcagaccctgcaagtcataaagtgggacgtgcacagcagcagtctattatcaaatggaagtggtatatacgtgatcgggccagagcaggtcctgaaggcacaagcaagttacatgaagaagttgctcaaatgcctatggtttctactcctgttacaatgccatctgctgccaagcatgcacctatagcctcatggggtgttccctatgatcaactgaccgaagaggagaagactagagcctggtttactgatggctctgcacgttatgcaggcaccacccagaagtggacagctgcagcattacaacccctttctgggacaaccttgaaagacacaggtgaagggaaatcttcacagtgggcagaacttcgggcagtacacatggtattacagtttgtttgtaagaagaagtggccagatgtacgattattcactgactcatgggctgtagccaatggattggctggatggtcagggacttggaaagatcacaattggaaaattggtgagaaagacatctggggaagaagtatgtggatagatctctccaaatgggcaaaggatgtgaagatatttgtgtcccatgtaaatgctcaccaaaaggtgacttcagctgaggaggagttcaataatcaagtggataagatgacccgttctgtggacaatcagcctctctccccagccatccctgtcattgctcaatgggcacacgaacaaagtggccatggtggtcgagatggaggttatgcttgggctcagcaacatgggcttccactcaccaaggctgacctggctacagctgctgctgattgccagatctgccaacagcagaaaccaacactgagccccagatatggcaccattcctcgaggtgaccagccagcaacctggtggcaggttgactacattggaccacttccttcgtggaaaggacagcgttttgttcttactggagtagatacttattctggttatggatttgcctttcctgcacgtaatgcctctgctaaaaccaccattcacggactgacagaatgcctcatctatcgtcatggtattccacacagtattgcttctgaccaaggaactcatttcacagccagagaagtacgacagtgggctcacgatcatggaattcactggtcttaccacattccccatcatcctgaagcagctgggctgatagaaagatggaatggccttttgaagacgcagttacagcgccaattaggtggtaacagcttggaaggctggggcagagttcttcagaaggcagtatatgctttgaatcagcgctcgatatatggtacagtttcacccatagccaggattcatgggtccaggaatcaaggggtggaaaacggaatagttccacttactatcactcctagtgaccctctaggaaaatttttgcttcctgtccccataactctaggttctgctggcttagaagttttggctccagagaggggagtgctcctaccaggagctacaacaaacatttcattgaactggaagctcagacttccccctggtcattttgggcttctaatgcccttaaaccaacaggctaaaaaaggaataacagtgttaggaggggtgatagatccagattaccatggggaaattggattacctcttcacaatggtggtaagcaagattatgtctggagtgcaggagatcccttagggcgtctcttagtactaccatgtcctgtgattaaagtcaatgggaaactacaacagcctaatccaagcaggatgacaaaggacgcagacccatcaggaatgaaggtatgggtcaatcctccaggaaaagagccaagacctgctgaggtgctggctgaaggtgaaggaaatacagaatgggtagtagaggaaggtagttataaataccaattaaggccacgtaaccagttgcagaaacgaggattataaagtaatatgaatgcccattgtaaatttactaatgtgtttgtgattgtacgagggatagttatatcatgttaggcgtatttacaaccttgttattgtttcatgtgaacatgagatattatttgtgtcaagttgacaaggggtggattgtagtggctattcctggttgtcaacttgacaatatttggaatgaactacaatccggaattggaaggctcaccagtgacccttatctggaggcttggagatccttatctggatcttggtttgaagatcttgagccatagtggctatggattccagaagattgaatctccgagttaaggaacacacctttaatctgggctatgcctttcatctgggattaaaggtgtggtggaacacacctttaatctgggctacaccttttgctggagacaatataaggacattggaagaagggagtctagctcttgctcttgctccttcgcctgcttgccgtgtgagactgagtaactgctagatccttggatttccattcacagctgcgactgaacaattgtaaggaattgggctgccgactgtaagttatcaataaattcctttactaactagagactatccgtaagttctgtgactctagagaaccctgactaatacaggggacatgttgcttgagacagaaccatgctatatagccaggttggctttaaacatatgaatctctgacttcagtctccaacttgcttggacaatattaatgcatactaccataccatggttattttgtgaacttttaactataaaaattcttctgtctaatatgtatctccatttgatatttttattagtatccatattttatctatctgggtctgtctgtcattatacttatatcagtgctgtaaattgaacccagtgcccggtgtttgataggcaattagtcaaaccataacgaatgactccagacaaataatgtaaaatattgatacaaattagatgtaagtatcacatgaagatctagttgacaattcaggtctaacaggttttttaatggcttcattttttaagtaagattatgccaggcataacatatgtgaagtcacaggctaaagatagaagtgctaacactgcaatctctgtataaatgaagatttgactatcatttgattagagaataatagtagtaaaacatattcatagatgataaacccaaaatgactgtgtcaactatttaaaattttgcatagtagatttgttttatcccagcaatatacctcttcttattaatgactaggtcaagttgcaacttttacaagttcgctgctgctgctgctgctgctgctgctgctgctgttgttgttgtttttgttgtgtgagtgtgtagtatgtatacacaagttcaggcacacctgccataagaacatgattgtgaaggccagcgacaaatatctgaagttggttccctaacagtcatacacaaacacacacacacacacacacacacacacacacacacacacatacacacacacacacacacacacacacacacacacatattgcccgagcttttgtccccgctggcaagaatacactcaggacaaccggaatcttctgcgacaaagcttttattgcttacttatcaggagggaagaccccgaaccgggaaaatggcgctgcttatatcacccgcagtgtgacatttcagcacctgatgtggtgtgacagctcctgattcgttgctcacccatcaccccattactacgctgtgagatgggcagtgactaggcgtgagttcactcttgcacttgcacataaggcttgtttactagttaggcgcagtggaagccagcagtatcttataatggtgattgctcacggcacgcacgcgattgctcgcggcttggctctccacatacacacacacacacacacacacacacacacacgtacacacacgcacatgtgcacacatactcacccataccataaattctggggatggacttcaagtaatcaggcttgcacagaagtcaattgtccttgctgagccatcttatcagcccccaagttgtatattagtttaggatgtcctcatttaagattacgtatgtttgtatgataggctaaagcagaagaaatatgttatgaagtttatgacaactttatgcttatatttaaggaacattgtcatagtaataggtgaagtcaatgctatagttcattgatgttacatttcacttaaggcattcatctatatggaaaacattcacgctaaatatacgttttgaattccgttaattaatgtacacttgcacagtttcctgaaaatgcttgtctggataagataaaaccatttatgagttaagagactgtcatttattcagggcaatcagatataatttgggagaattgtttgcccaaatgtggaagtttgaggttactttattttgccccagtctttataacctcatatgtaaactcagaaaataatatttaggattattttaataaagaaatatcaataactcctttatagggtatgtgtgtacacatgcatgtgtgtgtgtgtatgtgtgtgaatgtgtgtgtgtgtgtgtgtgtgtgtgtgtgtgtgtgcaagtggaggtcagaggagaatgtcagatatcatttccacatcagacatagtctccctgttctgttttaaaagaggatttctcactgacctgaagcttgcttaactgagtaaactaggctaactggacagtgggctgaagactgacccttcctcaccagcgctggaattgcaagtgcataccaatcacccatacattttacatgtgttcccaggctcagactctaaaattcatgattgaaatgttatggactaagcattctccctaggcttcaagcactttcaatatgcaatctcatttaacccttacaaaccactattaccattatcattttccagataaacaagctgagaaagggtcagaaaaatcaagagattgcataagtagggatagctgaatgtgcagggtttctgtgtctatttacacactttgatctctggtgattgataacaaaaaagatattgagaacaaattgtattttaagttatgacaaaggaaaatagactcatattaaaaattagaggattgttgactttttcgactctttacattgtttcatataaacaaatgatcctttttttctgactacatatgctttgatacagttatatattgacccaggtatgtatattgaaataggagtctgattgaaagaatatagtacctcactaagaacagtaaatgtggaaccagtgtcattacttgtgatagactataatagagacaagtttttaatttcttctgtttaaattttgatatgttttcttcttagtttttgagagtgtaagtacaccactttttcctttctcctttcccccctccaacccatgaacctcctttgatgaatgtgtgtgtgtgtgtgtgtgtgtgtgtgtgtgtgtgtgtgtgtgtgagcatatgtgtcttcacatgcatgaggtcatgtgtcctaaatatataaatataacctgctcagtctgtagaatgtagcttatatgtatataacttcagggctatttactattggagaagcaattggtgtgctcttctccacaaaaggagtaagaaaagacatttttcccactctccgcattccttagttctctttagttctgtgtctgaggctgaggcctcatgagcttggtctcttccatattagcatggctgtcgtccttgttcagggattatgttgattggcagacatgttggtgaaacttcacaggtgtagcttccctgacactctgtaacttttgtgtgagagctcttggtttcagttctcagcagacatgactctttagtcctttgagatgggctggccaactcaataaatccttataaatatctattggatattaaccacaatgaaacagaaatattgctatataataagcagagtttttaaagtacattccaaaacaattaatttaggttaaaaaaaaacaattaattctttttcatattagagaaaaattgtcattcaacagacttcatgtttttacatattttcagtgaatattaaaatatgtttttgacagtttgttctaatcaggacaaaattgattcatttttgttcaaaagataattaataataataaaatactctcaatttatccatgcaaaactttgttttactgaaacatctaacatttccttatagagcaaacaagtatttcttacaagttcatgtgtctttgtctcaatttaaagcccttttgtgagttattgtaccagcctttgcagcctgaaccaaaggcttagcagacaatgagctcacatgatcctctgtaggttgtggatgagaagtcaggagctccctgcctgatttggaatccacttgaagttagttatgactcatagagcttcatccagcaaggccttctcacaatctgtcttccattcagggaagataaaatggctgcattctccgtgtccgaatcaatcacgacacatagaatgaatgacatgctaagtcaagggcagcctgctggatttagtctacacaacagagattgctccttgaaggttttatgcgtgactttcatcaccctgtgttttctattccaggacccacccttcccaagactcatgttaaaacggcctcccttgggctggccggaaaggcaaggtcccctttgcttcccgtgtctgtgccaacagcccctgaagtgtctgaggagagccacaagcccacagaggatccagccagtgtaagaagctttgatcacagttatgctgctcaatgggatctaagacagtcagcatgcattgttatatcgggacattgttcttaccccttgtttatgtttgaatatggacagaaaacttaaaggaaaaaggatatatacccagagttttgttaaattaaagatatactcaagggcagccatattacaagagcattaactaatctatcagatcgtacaatcatatatgcttgtttatatatacatgtgtgtatccataagtgtgtgtgcacataagagtctacacacacacacacacacacacacacctgtgattactatgaaatatcttgaaatcctgtaaacaaaactatgtgttcattatttaactatttaactgaaagctatattctaagggatttttctgaagtcgtcattgcttctataatcataatgtgcacatgcgagtgtgcacacacacatacattccagaagaaaatacaaactgaagagacaaaatcattgtttgagaagagaaaaatggcaaagatgtgggatactaggaattattcaagctaaaagggagttgggcaaaagaaagaaaggggtagaagaagctctaatagaaaggaagtctgcccagaaatattacatggaaacttccaatcttccaacctcagatagaaaatcaagaggataacataacactgtcgtatgaagggggacagttgttcagacgctgagcaggtaatggggaccagagaactgaggagtggagaagggagggtgggggttagacaaaactaagtttatgcgaacaatcctttggaaataacactggcatgttaagctaacgaaaaatacgttttgaaactaaaaagaaaggttccttagttaaggaagggagattgtctggtaatgataaaatggaaaatagaaattttgagaggaggaaaaagaattgctatccgaagttcactatgatatcctgaaatggggctgcctacaggcagagctttggaatgttgctgtgctgaggattgttcaagaggaaacatttcaaagactttcatagaattaacatatcagataccttgactatcaggatgggaaaaaaggttatattcctaacattacttttgtgggttttttttttcaagcatggattgtgaaaaaaaaaattgctgctatcaactaatttctgttacctcatgcactgagacatacaccaagtttccaaatgttacaatgataaaactttaataaataaccaaggacaaaagcagcaactataatcagtccttgataaacctataaaactaccagtttccttggctaaaattatttccatcagaaatctgattgtcaaaacaaaaagattagtttatttgaataacaagtaatacatttttcatgacttcttaaaattttaaacataaccattcattttgaaccatgaagtaatataataacataaaaaccaaggaaatcagtcatgtatatctttttttctgaatattcagcagaaggacagtacctgtttagcaaaccttctacaagattaaaatttcaaggtacctactcctcccttgtcagagtacaactacttatttcagtgtcagtctagtcacaggatttgtggccctgtctaaatttaggttaagatactaaatttacaaagtgcttcttatatgagaagtcctcattctaatgtcaaatggcctgctttacactgaaggttccctgaatatagcgaaagcaatgggcagagtattaaaagcagtgagacatgtatatgaaaggtaaggctgaaacaggacacatttagatcagcagcttcctgtaaagtaataatgtgactgaccccctgtataaattttaaattttctaggtgccacattaaaagcaaaaaaaataaataataaagtttaatttaatgctgtcttattatttaatccaatttttcaaaatattaacacttgataatcataaaccaaatatcaatttggtatttttccatctgttttcacattatgcattgagaattaggtatgtgtctcatatgctaaacacatatatttagaccaactgttttcaagaattaaatagctgcattcagataaacaacccagacaaacaaaacatcaaacctaaaaatggttgaccaaggaccgatgtggtagcgctaaaggcagaggctgatacagctgagttggaggccaatccggccgacatagagagttcaaagccattccgaagtacccagtgagaccctgccttacaaagaaaaaggagaaaaggggagaaaaaaaaaaggaatcatgaatgaaacaaaaatttttgatcaagtagtcattttccaatttctctctttttgtacaagacaatgtgttgagccaatgggttacttttcgatccatggtcaattctgaatggtatatgaccaaactgttcattaacatgttctaaatgaagctcatgggttgatgccatgtgctcatgtatcttgaatattcttcggtggatgacaagttttctgaggatcctgtagaaaaaaaatttctgcaggtctcttggtatgatggacattgacttagcaagattacagggctctctgaccatgatattaagtagtgcttattggctttatagagtataaatcatgatttggaacattgtcccaatcttataactaattaaagtggatggttgaggataatccagaattatactcatgcctatatttattaacacaaactatatttaagaaagggggaaggaggcaattattacttgttgattatttaccagcaggcagcactgaagtattggacatattcccatttgacaaagaaaagactagctaaaagcaggaagtataaaaatgttcaaattatttcttgataaagtcaaaagttctaagaccagtaactgaatgtattagataagtagaaatcctggaactcacaaataacatcacacaagggactgactcacagtgagcgaaaggtgattgattcagtaaaaattgtacaggtaaacttcttagtttatacagaatttatatcacactgtaagcgtcccttcacacctatgccaagcactctggctttgaacataaaactttgtttccactcacaagctaaagttataatctatatatttctgatcagccaagaaatcgtcaggttgccatgcaaaatttaaaatctgtcatgctattaaagaaagaatactggtgatgctgatctttagatactttttagatgcctatttatagatagccaatcaaaacgaagaggaactactgtgttaatatggatcacaggtcagacattgtgacatgcagggagcatgtcaggggatgctcagaataaactataaaataggcaccattatcatttcacagacaagtagaattatacaacagagaaatcttctaacttgttcactactacaaagctagccattggaagaatatgacttaaaatagtatatttttaacagtgaagcttttttccctattaaaggtatagagtacatggaagcagtattcagtagcttattggtagctcttttgctattacaagttcattgagttaaaatattctgagagctgctctacctatcagtccctatgtaaatctcaagaataataagtgacccaacttacagccagacactaagtggatctatcatggtaggagcctaccaagacctcatcctgactccgttctcattctctctccaggtatatgaacaggatgacttgagcgaacaaatggcaagtttggaagggctaatgaagcaactcaacgccatcacagggtctgccttttgacactcattgccaaaacgttgagatcttctgggaactttacagcataccaattatccataaacagcacacctgtgtccaaaaactcttaccagtgtacaggtcaaccatctggaccattcggttaaggaacatctgaagcacttcagaagaaaacagtatcccatcctatatggacatcaggagtatacgatgatggtcatgaggtcccgaagatgcatcttcactgcaaagtcaaggctgaagctgctagcatagttctgggtctttgtcactgcagggaccatggtgtcataactaatgcctacattttccttcagtgagacctttcattttctgtgtaggtctagtctcacaagtgcattatttcagcctgtaccatgccataacaaatcaatacaaactcactatttttttcagctacagagcatccatggtaactctctcactccatagcaccaaaggattggatattttcctgacagcataaaagaaaataagtgaataagcaaaaggcagtgaatgcttgtttatagctcaatcattccatctcacaaaagtggctgatgttagtgagtgggtataaactttttaccaattttagcaagtatttgtaaatccatccttgattaacgtttatgtctagcaagtagaaacttaaaaatcctcaactggtggcatcctgccagcaacaacacctttctagaaggagaatacaatatgcaatcttctcagaca

SEQ ID NO: 78 - DNA, 5211 bp, Mus musculus
cgaggaggaagaggaggaggaagcctagggggctcggcgcgggtgtgtgcatgtgtgcatgcgtgtgtgagtgcatgtgtgtgagtgccaccgctgcccaggacccccggccccgaaggtgttggctgaaatatggagaatagtcttggatgtgtttgggtacccaagctggcttttgtactcttcggagcttccttgctcagcgcacatcttcaagtcacgggtttccaaattaaacctttcacgtcacttcattttgtgtctgaaccttcggatgctgtcaccatgcggggaggaaatgtcctgctcaactgctctgcagagtccgaccgaggagttccagtcatcaagtggaagaaagacggccttatcctagccttgggcatggatgacagaaagcagcaacttcctaatggatctctgttgatacaaaacatacttcattccagacaccataagccggatgaaggactttaccaatgcgaggcatccttagcagattctggctcaattattagtcggacagcaaaagttacggtagcagggccattgaggttcctttcccagacggaatctatcacagccttcatgggagatacagtgttacttaagtgtgaagtcattggggaacccatgccaacaatacactggcagaaaaatcaacaagacctcaacccactcccaggagactcgcgtgtggtcgtcttgccctccggagcattgcagattagccgacttcagccaggagacagtggagtctacagatgctcggctcggaatccagccagcataagaacaggaaatgaagcagaagttagaattttatcagacccaggcctgcataggcagctatattttctgcagagaccatccaacgtaatagccattgaagggaaagatgctgtcctggagtgctgtgtttctggctatcctccgccaagtttcacctggttacgaggcgaggaggtcatccaactcaggtctaaaaagtattcattgttgggtggaagcaatttgctcatctctaatgtgacagatgatgacagtggaacctatacttgcgttgtcacctataagaatgagaatattagtgcctctgcagagctcacggtcttggttccgccctggtttttaaatcacccttccaacctctatgcctatgagagcatggatattgagtttgaatgtgcagtttctgggaagcctgtgcccactgtgaattggatgaagaatggagatgtggtgatcccgagtgactattttcagatagtgggaggaagcaacttacggatccttggggtggtcaagtcagatgaaggcttctatcaatgtgtggctgaaaatgaggctggcaatgcccaaagtagtgcccagctgattgtccccaagcctgccatcccaagctccagcatcctcccttctgctcccagagatgtgctccctgtcttggtttctagtcgctttgtccgtttgagctggcgtccacctgcagaagcaaaagggaacattcaaaccttcacagtctttttctccagagagggtgacaacagggagcgagctttgaatacaacccagcctgggtcccttcagcttactgtgggaaacttgaaaccagaagccatgtacaccttcagagttgtcgcctacaatgagtggggaccaggggagagttctcagcccatcaaggtggccactcagcctgagttgcaagttccagggccagtagaaaacctgcatgctgtatctacctcacctacctcaattcttattacatgggaaccccctgcctatgcaaatggcccagtccaaggttacagattgttctgcactgaggtgtctacaggaaaagaacagaatatagaggttgatggactatcttataaactggaaggcctgaaaaaattcacggaatatactcttcgattcctagcttataatcgttatgggccaggagtatctactgatgatataacagttgttacactttcagacgtgccaagtgctccacctcagaacatctcactggaagtggttaactcaaggagtatcaaagtaagctggctccctcctccatcgggaacacaaaatggatttattactggctataaaattcgacacagaaagactacccgcaggggcgagatggaaacactggaaccgaataacctctggtacctcttcacaggattggagaaaggcagtcagtacagtttccaagtgtcggccatgacagtcaatggtactggaccaccttccaactggtacacagcggagaccccagagaatgatttagatgagtctcaagtccctgaccagccgagttctcttcacgtgaggccccagacaaactgtatcatcatgagttggacacctcctctcaacccaaacatcgtggtgagaggctatattattggctatggtgttggcagtccttatgctgaaacagtgcgtgtggacagtaagcagcggtactattccatcgagagactagagtcgagttctcattatgtaatctccttaaaagctttcaacaatgccggagaaggtgtccctctctacgaaagtgccaccactcgttccataacagatcccactgaccccgttgattattatcctttgcttgatgatttccccacctcgggcccagatgtctccacccccatgctcccaccagtaggtgtacaggctgtggctcttacccatgaggctgtgagggtcagctgggcagacaactctgtcccgaagaaccagaaaacatccgatgtgcgactgtacaccgttcggtggaggaccagcttttctgccagtgccaagtacaagtcagaagacacaacatctctcagttacacagcgactggcctcaagcccaataccatgtacgagttctcagtcatggtgaccaagaacagaaggtcaagcacgtggagcatgactgcacacgccaccacctacgaagctgccccaacttctgctcccaaggatctgacagtcattactcgagaggggaagcctcgtgctgtcattgtgagctggcagcctcccttggaagccaatgggaaaatcactgcttatatcttgttttatacattggacaagaatataccaatagatgattggattatggaaactatcagcggtgaccggcttacccatcagatcatggatctcagccttgacacgatgtattactttcgaattcaagcacggaatgtgaaaggagtagggcccctctctgatcccatcctcttcaggactttgaaagtggaacaccctgacaaaatggctaatgaccaaggtcgtcatggagatgggggttattggccagttgatactaacttgattgatagaagcactctcaacgaaccacccattggacagatgcaccccccgcatggcagtgtcactcctcagaagaacagcaacctgcttgtaataaccgtggtcaccgttggtgttctcactgtgttggtcgtggtgattgtagcagtgatttgcacccggcgttcttcagcgcagcagaggaagaaacgggccacacacagtgtgagcaagaggaagggcagtcagaaggacctccggcctcccgatctttggatacatcatgaagaaatggaaatgaaaaatatcgagaagcctacgggaaccgaccctgcaggaagagactcccccatccagagctgccaagatctcacaccagtcagccatagccagtcagaaacccagatgggaagcaaaagtgcctctcattcaggtcaggacactgaggacgcaggcagctccatgtccactttggaacggtccctggcagcacgccgggccaccagggccaagctcatgattcccatggaggcccagtccagtaatcctgctgttgtgagtgccatccctgtaccaacactagaaagtgcccagtatccaggaatcctcccatctcccacatgtggatacccgcatccacagttcactctccggccagtaccattcccaacgctgtctgtggaccgaggttttggagcaggaagaactcagtctgtgagtgaaggaccaaccacgcaacagcaacccatgctgcccccagctcagcccgaacatccgagcagtgaagaagcacccagtagaaccatccccacagcctgtgtgcggccaactcatccactccgcagctttgctaacccattactacctccacccatgagtgcaatagaaccaaaagtcccttacacaccgcttttgtctcagccaggacccacccttcccaagactcatgttaaaacggcctcccttgggctggccggaaaggcaaggtcccctttgcttcccgtgtctgtgccaacagcccctgaagtgtctgaggagagccacaagcccacagaggatccagccagtgtatatgaacaggatgacttgagcgaacaaatggcaagtttggaagggctaatgaagcaactcaacgccatcacagggtctgccttttgacactcattgccaaaacgttgagatcttctgggaactttacagcataccaattatccataaacagcacacctgtgtccaaaaactcttaccagtgtacaggtcaaccatctggaccattcggttaaggaacatctgaagcacttcagaagaaaacagtatcccatcctatatggacatcaggagtatacgatgatggtcatgaggtcccgaagatgcatcttcactgcaaagtcaaggctgaagctgctagcatagttctgggtctttgtcactgcagggaccatggtgtcataactaatgcctacattttccttcagtgagacctttcattttctgtgtaggtctagtctcacaagtgcattatttcagcctgtaccatgccataacaaatcaatacaaactcactatttttttcagctacagagcatccatggtaactctctcactccatagcaccaaaggattggatattttcctgacagcataaaagaaaataagtgaataagcaaaaggcagtgaatgcttgtttatagctcaatcattccatctcacaaaagtggctgatgttagtgagtgggtataaactttttaccaattttagcaagtatttgtaaatccatccttgattaacgtttatgtctagcaagtagaaacttaaaaatcctcaactggtggcatcctgccagcaacaacacctttctagaaggagaatacaatatgcaatcttctcagaca

SEQ ID NO: 79 - protein, 1439 aa, Mus musculus
MENSLGCVWVPKLAFVLFGASLLSAHLQVTGFQIKPFTSLHFVSEPSDAVTMRGGNVLLNCSAESDRGVPVIKWKKDGLILALGMDDRKQQLPNGSLLIQNILHSRHHKPDEGQCEASLADSGSIISRTAKVTVAGPLRFLSQTESITAFMGDTVLLKCEVIGEPMPTIHWQKNQQDLNPLPGDSRVVVLPSGALQISRLQPGDSGVYRCSARNPASIRTGNEAEVRILSDPGLHRQLYFLQRPSNVIAIEGKDAVLECCVSGYPPPSFTWLRGEEVIQLRSKKYSLLGGSNLLISNVTDDDSGTYTCVVTYKNENISASAELTVLVPPWFLNHPSNLYAYESMDIEFECAVSGKPVPTVNWMKNGDVVIPSDYFQIVGGSNLRILGVVKSDEGFYQCVAENEAGNAQSSAQLIVPKPAIPSSSILPSAPRDVLPVLVSSRFVRLSWRPPAEAKGNIQTFTVFFSREGDNRERALNTTQPGSLQLTVGNLKPEAMYTFRVVAYNEWGPGESSQPIKVATQPELQVPGPVENLHAVSTSPTSILITWEPPAYANGPVQGYRLFCTEVSTGKEQNIEVDGLSYKLEGLKKFTEYTLRFLAYNRYGPGVSTDDITVVTLSDVPSAPPQNISLEVVNSRSIKVSWLPPPSGTQNGFITGYKIRHRKTTRRGEMLEPNNLWYLFTGLEKGSQYSFQVSAMTVNGTGPPSNWYTAETPENDLDESQVPDQPSSLHVRPQTNCIIMSWTPPLNPNIVVRGYIIGYGVGSPYAETVRVDSKQRYYSIERLESSSHYVISLKAFNNAGEGVPLYESATTRSITDPTDPVDYYPLLDDFPTSGPDVSTPMLPPVGVQAVTHEAVRVSWADNSVPKNQKTSDVRLYTVRWRTSFSASAKYKSEDTTSLSYTATGLKPNTMYEFSVMVTKNRRSSTWSMTAHATTYEAAPTSAPKDLTVITREGKPRAVIVSWQPPLEANGKITAYILFYTLDKNIPIDDWIMISGDRLTHQIMDLSLDTMYYFRIQARNVKGVGPLSDPILFRTLKVEHPDKMANDQGRHGDGGYWPVDTNLIDRSTLNEPPIGQMHPPHGSVTPQKNSNLLVITVVTVGVLTVLVVVIVAVICTRRSSAQQRKKRATHSVSKRKGSQKDLRPPDLWIHHEEMEMKNIEKPTGTDPAGRDSPIQSCQDLTPVSHSQSETQMGSKSASHSGQDTEDAGSSMSTLERSLAARRATRAKLMIPMEAQSSNPAVVSAIPVPTLESAQYPGILPSPTCGYPHPQFTLRPVPFPTLSVDRGFGAGRTQSVSEGPTTQQQPMLPPAQPEHPSSEEAPSRTIPTACVRPTHPLRSFANPLLPPPMSAIEPKVPYTPLLSQPGPTLPKTHVKTASLGLAGKARSPLLPVSVPTAPEVSEESHKPTEDPASVYEQDDLSEQMASLEGLMKQLNAITGSAF

SEQ ID NO: 80 - DNA, 779603 bp, Homo sapiens
  misc_feature (1)...(779603): n = A,T,C or G
gttccaggttttcaaattaaagctttcacagcactgcgcttcctctcagaaccttctgatgccgtcacaatgcggggaggaaatgtcctcctcgactgctccgcggagtccgaccgaggagttccagtgatcaagtggaagaaagatggcattcatctggccttgggaatggatgaaaggaagcagcaactttcaaatgggtctctgctgatacaaaacatacttcattccagacaccacaagccagatgagggactttaccaatgtgaggcatctttaggagattctggctcaattattagtcggacagcaaaagttgcagtagcaggtaggtggattcttccttctcttcctcctcctccttcctctcttcttcttattcatttttggggatgagaaaataatttttgtagaaataatgtacattttaaaaatcttttaaattttaagttgacaagtaattatatatttttatgaagtacaatgtcatgttttgatgtatgtatacatcgtggagtgattatatcaagctaattaacatatctgtcaccacatacttctctcttttctgtggtgagaacatttaaaatctactcttttagcaattttgatatatacgttgctgtgcaatagatattaaaagcttatttcttctctctcactgaaaccttgtgccctttgacaaacatctttccattccttaccacgccccatcttcccaagcctctggtaaccattctgctctctagttctatgagtctgacttttttataatagattctacctgtaagtgagatcatgcagtatttttctttcagtgcctggcatgtttcccttagcataatatcctgtaggttcatctatgttatcacaaataacaggatttactctttttaaaggctgaatagtattccattgtgtgtgtgtatgtatatcatatatacacacacacacatatatatatatatctcatattttctttacccattcgtgattgattccacatcttggctgttgtgaataatgctgcaattaacatggagtatagatatctcttatataccctcatttcaattcctttggatatatacccataagtaggattgttgtatcatatggtaattctaattttagttttttgagaaagctacataaccatttttcataatggctatctaatttacattttcaccaacaacgcacatttttaagaaaaaggaaagatgtaaaaagattcatgtttattctctcatggatttgactgacctttctccttaaattatcttagaaaacagtcataggacctcaactggctgcgtaaagttatgagattatttttttaaacaaaactgtttcaagttgacttactacttatatctaagggaggacttctcattaacagaaaaatattagaaaatataatttgctaattttactttacagcttcattaaatgctaaacttttgcagagtccatttttttgttgtggggccttaagaagagtaaattttattttaattatagtggcatggcctacaacatatacatgtcaagtaagaaataaaaattccttctagtgcttccaaatttcttaacgcttggtaacatgttggctcaacagctgagtaataagatgaacagtttttgttttcacctggatacactgaagtcatgtagactctgaaaaaatggtactgaccattctggaacccatgatattgctatttctgccccactcttctggttagaaggcagctcataattatttctgttggcccctgaaatgttagacctgcaaagtgaagaatcagtttttttacttgtttctataaagatttgaccaaaacctgtctttttttttaacttttatattgaccataaagcaaggcaagcagattgaacttgaaataaatttaagttatgaatgggtaagcagatttgaagggctgctttcaacgtaatctttagttctcaataaaaacaatattgaatcataggctgtttagtcatttgttatgggttttctttcccaggtcctacttagtctagtctcatcttggaagactgatcagaataactcattttcatcaataacaggacaattgggcagaatcaccactccttcatgcactctcctagtgagggtctgagaaagttgaaatctgaaagatgtgattttgtcaggtggtgctataaagaattacatctcatagatatgtggttaattcccatatgtagcttcaaaccactcttctgtagcttttctccactaagaactctgtagactgaatgttttttctccctaaaatgtgtatattgaaattctaacccccaatgtgatagcactgggaggtggagcctttgagagataattagatcatggggtggagccctcatgaatgtgattagtgccgttataaaagtaaccacagaacacccctgctcctttcaccatgtgaggatacaatgagacgtctgtaatctgcaacccagaagaggaccctcatcagaaaccaatcatgctggcaccctgatctcagatttccagcctccagaactttgagaaatcaatgtctgttgtttacagcctacccagtccagatactttgtgatagccacccaaactgatgaaggcagagttttccatagtcagttaagccagattttacctagaggtagactggctagccattctgcttttctttggactgacttggcttttgcacttgaaagtcccatatcctgggaagccacctcagtgccaggtaaaaccaggacagtgggtcactctacctcaaagtgtccctggtctgctttagcaatgacagactgaggtgcagatgcagaaaaccccctctactcaggagacaggccaggtgacatcctgatggtgaaaatcaaggctataaagtaactggaaccttggagtgatgagtgtctgaaatttgattgatgagtataaagtgtagagagaactgaatgttaatgttaattatgattgattaggagaaacaagtggaataaatccttcagatttggtaaaagcagctttctcagaatgctccaaatgaagtggaaaggggacaatttgactttcagtcactagagaatttctggcctcatagatcccacccatcagttgtccacaaggccagaggaggtctgctgatttgaatgaagcaggctgatattttgatgccttattatgaaaggcagctgcctatgcactgttaatgaaaatggcctgttacattgcagtttcagtcttcatgcaatctacattcacatttacatgtgctgtctttcagtagtgaaatgaagaagagttccttcgctgtgagatattaaaatacagtggcttggactttagtattctgtacaaggataggcacacggattcagtcactgagttaaaatctcatattagattgtatcatttcaaggcaataaggctgttcacagcattttaaacacttaccatgctgtttggcaacacagaatacatcaatgttatgtctgctgaggttaagattgccaaaccactagaattcacaaggggcatatatcttcccagtaataaagaccatggacctgatttaatctcagttttaaagcattagcactcaataaaccagtcaccactaaatggtaacagtaggctttgcttgggtaaaacaacaacaacaaaaaaatgttttgtactctcaggtgctgtatagagcccatattaaataatgtccctcttccatttttgctttctcaaagtgtcttttgataaaaagaagtgtagcaaatgaaatctgtctttaatcagtcagcacattttacacaatgatcttgccatgcaccattcatcctattttctaggagcttctcaagtgctcttaaaggcttgagtgcacacttggctggagagggaaggaaagtaggaaagataaacgaagaactatcattccatccaacattttcttaaaagttgcaaagtaacaggctactgactctcagtatttctagtcattttgagttctatcagtaaagaatacctgggctattaagcctccatttgaaagcaacttcatcatactggctgaaatttgggaattttatttttatccaattagctctaatctaaaatgctgcagtgtttctgtgccatgtatacttctatttagtcctctagattgagaacagctgaagaagggaagcagcgctgaacttatctatgaagctttcctaccatcccctctactgtgtatctagcaaagtatgtcatgttaatagtagacatttgccttaccaatgaagacctggggctttatgccatataaagagagctttccgctgttgccatcctcctctctacctctccttctttgtctcccttctactcctcctccttcttcactggatttcagcagatcaaactcacccatatatgtgcatacataaacatactcttaacaaactgagttggaataatttgctttatatctcaatagcctacaaattaattaactattgaaaactttgtgattagaaaattgactgtttgggaatattcaagtgccacttaaaaaggaaaaagcatgagcatttcttcattccttccctaacccttaccgtgaaaatgaacttgcatctggccaagcacatcttccctactctaaatgttgccagctatctgagcctctggagtattttctgttcagcagacataataataacctacctcccaaggctgtggtaattttcaaacaacatctaggatgtaaagctctagtgcagagtagattcttattcaatgacagccatagtataaatagaactaacaattattattattgtgttattttaataattattaggaatgaacaactttcaatattcccatgtgatgatgcaaaatattttttttcagggcaatgaaaaataggcaacaaatcctgagacatacatattgtaatcttggatcagatatctgcctttgcaatctgtgaacacaaactggcaagcctgaattaagttttcaaaaagttaaatctatgggagattttttggcaagcagtgcccaaatcccttggaataaaagattcatttttgaccactggatctactattatgttaatgcaatcaatacagtttgtactgaccagagcaggcatttgagattgagtgaccttgcaatcatttccaaaacatgtacagggcactcctctcagccttcttaatggcttttcaactgaaaaagattcactgaagctggttcatgggagttcacttggtctcgacttggagtttaacacaactggtaccctcctggggatgaggaattaattctaatatgtaagaagactagataacaatagatttcctatgaataaacataaaaatcccattttattttgcttttttatacaaccatgaccccctgtccacccttccccacacctacccacccacacagctccttgtccactgacttgccctgcacactctaaggagcacggttggagcctaagtggtacttctgcttgcatttatacttctggggatggcgtgggacaggctcctccaagggtaaagcaatgttgactgctggatacattatattgtatttgtgtccaggtagatttgtctttgttaatttttcagcatttacattttaacattaaaaccactgacttgctttttatagcagtttctgcttcagaaagtgaatctctatacattaccttgtaatgctcagaaactgtgatttaagtacccaaattgacaggttaagaacttactggaaaaagctaagagctctatggccagagattgggacttagatagtctaaatccagatgcacacttattcccttatcactttgcttctcaatctaaggactagatttcagaacgctgtaaacaatttcttatgtaatcagtcatttatttttaatcaatgaaactctccacaatacaaattaaggaaaataacaataatggtaataatgataataataatgaaaatcgatttatccacttagtcccttgaaaatgtcaactccttgtgggaaacactatgatttagatgttttcttctaagatgagaagattttgctatcatagctatacattcaatagtgacacatgacaaatctgtgtcagaaaaacagacagcatataatttttaaaataagctcataaataatgatctttctaggaacacaatttggtaatcttttatctttctaagtggttttacaattcaggcgaagtttgcatattttttttctgcttcttaaaaatcaagaaaataaaaggccaactaaattgcatttcttgacttgttatttcattcagggacatatttttttcttccctattacaatagatgttcaagatgcaaattgtcacactctgcttttaaataacacctgcattataattaaaattcccctgtgtttttaaaaaataattaattacttgaggagttgtttcagtgaattctcttctagaatgcctcccatttaaatgagttatgaaataattagtgaaagcatattatggtgagagaagctagaatgaagcattttgtgaaatgataacctgacctttatgttcttacttaaaagaacctgaaaaaaaaaaaccttaactgaagagaaggaagaataaaccacattgcctcaggtcactcaaatgttatataaaggaaacaccaagaaaaatgtttatattccttctctctacaggagcaaatataagaattttgcctagaaggtcaacttcatcctgtgcagcagtctggaaaatgtatcccagggcccttgaatacgctcagaattctatttgggaaggtttggttacagtgcagagctttccattttacatttatagagatattgtttattttcaaatgataagcagaaaattaaattgctctgactctgtaattcttaatgacttaatgatcttcatttagctaaatgttcccattgttttgtagttaaagcatgagagaaagaaaaaataagaaataaatgtggtcttataagtaactgttatatgtttactagtcttatcatttttctttaattttattgctaaatcaaattgagatacagccatcaccaatatttccccaacgcctattccatcacacagcccccacaccctcaacttaaataattgcattttaaagagtagggttttagttgcctccttcctaagtcaattaactctgcaataaaattaaaatacaaatatattcctgaaaaatatgcagagtgaaaagacatcttctacattataaaatttacaatagagaacttgacaaggctttttatagtagaaacatcaacaaaataacctaaaaaaaattttcaacctttcatttccttttctttgttatgaattctaattcatgtgacaatggaaatagctaattattcattctaaatttaatcagtatcttaagagctctgttcttttattcaactcttaagctgtctacagttcgattttgctggtactgtaatgaaaatgcaagagaaacatctaacacaactcagtaatagtaaccaaaaactcttttgaattttagaaaacctttttggaatacaaaaatttaagtttcttgaaaaacgtcaagataaaaaagattcaaatcatagtaatgtgagagaaaataatgtaatatctgttcctttacatcacaaggaaaatatattacactgttaatcttgttaatctttaacaaaacacagattaacaagaaaaaagcataacaaatttatttaaacaaagttatacacaagtaactttcagaaatgaagacccaaacccctagggaaagctttatatttttatgctaagtcttatcagagaagtggagaattgtggaaaaacatgattggacagagagcatagacaaatggaaataaactgggggaacttgagtaaggtctgattgttcaaataattgtctgcacctctgtatgatattccttcctgtattagtctgttctcacactgctataaagaactgcccaagactgggtagtttataaaggaaagaggtttaattgactcacagttctgcagggctggggaagcctcaggagacttgtaatcatggtggaaagggaagcaaacatatccttcttcacatggcagcaggaaggagaagaatgagagaagtgcagagtgaagtgggggaaagccactcatgaaaccatcagatctcatgagaactcactatcatgagaacagcattggggaacaacccccatggctcaatcacctcccacgaggtccctcccacaacacgtggggattacaatttgggttacaattcaagatgagatttgggtggggacacagaagcagaccatatcacttccccggctatggggcaggactcctgtcacatgagggtttcttttatggacagctctcacatagaaaggtgggagatagtcagagcgtgacctccaaaccaccacattttggtgtagcatgtcctgcaccccatcattaagtagaataattgtagcattacattagatagcacagttatacaattctgatgaaataatgatggataataactttatgaacctatttctggtactgatttttgtcctatttttatgtgtatggtaaaatatattatttagactcaataactgtatacaaacacatttgaattaagatattaatattagatacaaagcttttctacaaagtaaagagacatcaaaacctagagtgtgtcctggaagccaagtaaattaattagaggaaatcatggaaaatctcagtgtatggtacttcaaccatcttaaacgtctactgtcataagcagtatatatagatgaaagtaatgaatacagttagtgaacacaattacttatctccctgtaaaaagttattgttaacagtctttatatttataatctatatctgcatactctataataagcagtctaatacattggtcattgtattagtccattttcacactgctgataaagacataccagagactgggaagaaaaagaggtttattacagtctacatggctggggaggcctcacaatcatggcggaaggcaaggaggagcaagtcacatcttacatggatggtggcaggcaaagagagagcttgtgcaaggtaactcccctttttaaaaccatcacatcttgtgagagttattcactaccatgagaacagtatgggaaagacctgcctccatgattcaattacctcccacagggtccctcccacaacatatggtaattcaagattagattttggttgggacacagtcaaatcatatcagtcattatgcctatcattgctaaatttgcctattatttggtagaggtaagagaataaatcagaaaaagccatttggattcatgaaagagcgagataattttgacctagcaaatcagttgttttggaccttgaatcatgaagttaacataaaacaataacaataaaacaacaatgataaatatttctgatagaaattcaataatcagagtaggtcccaaatttccaaatttatcttttcattctatgttatactgggaatgaacaaacacaaacccatgcacacacacacacctgtgactcttagtgctctagcccagagttctttggaagtttcctgttaaaagacagagccttagcctcaaaggtcaaagcgcttccactgaaaaaccttgtttgaaaaattccctctgtagtctcagctactcgagaggctgaggtaggagaatgtcgtgcacccaggaggcagagcttgcagtgagccgagatagcgccactgcagtctggcctgggtgaaagagtgagactctgtctcaaaaaaaaaaaaaaaaagaaaaaaaaaaagaagaaggaaaaaaaagaatttccacagcatctgaggagcagcttttaggtccacagaatttatcacaggttcttaaccagcgcttattgtgaaatgtaactcaggtatctctaattgggccagatggagctatggagttctaatttctggagggcagttaagcctcaaagtttggtttctcagagtagcatgtctaccttcagaatcccaatgagcatgtgtcagagaaaagtcacatttaaatagtttgataggctgggcatggtggctcatgcctgtaatcccaacatttgggaggctgagatggcaggattgcttgagcccaggaattcaagatcagcatgggcaacatagtgagaccactgtctctacaaaaaaataaaaaattacctggctatggtggtgcatgcctgtagtcccagctacttgggaggctgaggcagaaggatcacttgagccaggagatcaaggctgctgtaagctgtgagtgtgccactgcactgcagtctgagtgacagagtgagaccttatctcaaaaaaaaaaaaacaaacattttttaaacaaaaatttaaaaaatatttgataggtctcagtatatctggggctgggagtggtggctcatgcctgtaatcccaacactttgggaggctgaagcaggaggatcacttaaagacaggagtttgagaccagtctgagcaacatagcaaagtcccatctctacataagatttaaaaattagccaggtatggtagtacatgcctgcagtcctagctacttaggaggctgaagtgggaggttgcttgagcccaggagtttgaggctgcaatgatctatgattgcaccactgcactccagcctgggcaacagagtgagatcacaacttaaaaaaaagatggtcatatatgtgggatatagtttgtgtgacaggatctgtattctatcacatctgcatatttcccgtgatgatctgtaaaggaatgagtttacactatttacatcctaacttaggttacccagagatatttagatataaacacagtacacagacacattcacacacctttccatttagatggctcttcctagataagcttctgtatcttcaatctactgatgaacaccatggtcataaaatctgcttgttgatttataactcctgttcttttcatacacattttaaaaatctgctttaaaaaatcagtttcattgtaaccctgaggctttatcacccttgaaacaggctgctcatcaggttcatttactaagattttacctgaaacacttcaccaactagaaacctatttaagaaagtatgttaaagattaataaagcctatatagcttcaacattaaatttcagtgctggttggttttattggattggatttttgtggtcccttttgcaaaggaattcatctccaaaggctgaaacatgacataaaaaataattagtatttctttgatgcagaaggcacaggttccaggagcatcctttgaatcccacagtgcattgggcactccatgagccaaccttgtggctatttttctaaagttgtttccagttatgtcccagcccaggagtggccaggtttggaatatgtaattgcagataaaataaatgttctcttccacctcagtatacacattgtgaatatctgggatttgtttatttgtttttattgggaaatagtttatataccataacatttaccctttaaaagtatataatccagtcactattagaatattcataaaatcgtgcaaccatcaccactatctaattccataacattttcatcactcctatctccccttctgctcctgctctggaaaacacttatctacttcctgtctttgctatttaacataaatgagattatctgattatcctgtggcttgttttttcacttaatgatatatcttgggcatcttcctatatttgttcttacagatcagtttcatggtttttaattcctgcataatatttcatggtttatgattcacatattgaaagctattctatttgtttctgaatttttgcttttgctaataattcattaatgaatgttcttgtatttagtaaatgctcttctgtacatacctttgacaagtcttcttcttacctagtggtgtaatgacttaatcaaacggtatgaacattttgatagaaactggtatattcaagagcattttattagcctggacctaaacattgtaagccaggatttgttttactgctattgactgagcatatagagctgggttcttcttaacttgtaaatatcattgaagcctactgcctactctgataagaatagtgacgagttgacactgttaatgaatagccataggcatttgtcagagagaatcttatacatggaaacctagaggaatgcatctcatccatgtcctgggtttctgactatggtttggatattcatcccctccaaacctcgtgttgaaatttgatccacaaggtggggcctaatgggaggtgtttgtgttatgacagtggatttctcagaatggctcagtgccatcctcacagtgataaatgagctcttgctttattagttcccaggagagctggttgttaaaaagagcctggtgtctcctccctctccctcttgtttcctctcttatcatgtgatgtctgtacatgctggcttcccttcaccttctgccacaaatggaagcagcttgaggcccttatcagaagtagatgttggcaccatgtttcttgcacagctttcaaaaccgaaagccaaatgaacgttttttctttataagttatccaacctcagacattcctttatagtaatacacatagtctaagacaattttccatgtactgatttgtgtctcttctgctgtctgtaaaaagaagtttctagtagatatcactccatgaactatcttgggattcctcttaggtccaaaataacaatttttcaggctctgtatataatgtcagaccccatagagtcacatcagcataccatagaagaatgagaactctttctggtggcctaaatgtcttttagcatctgagtcctgcctatacctctagcctcattttcttttcttttttttctttttttttttttgagacagatcattgctcatgttgcccaggccggagtgcagtgatgtgatctcagctcactgcaacctccgcctcccaggttcaagccaagtaattctcctgcctcagccacctgagtatctgggattacaggcatgtgctagcactcctggctattttttttttttttttttttgtatttttagtagagatggggtcaccatgttggccaggctggttttgaactcctgacctcaagtgatcctcctgccttggcctcccaaagtgctaggattacaggcataagccactgcacccagactctagcctcatttgtaaccaaatccatactcatctcttcatgttttacagcaatttgataaatgtgcattctggtgccacggctttgcaccctttattctatatgccttattctctcatacatcatgctagctcttgccttttcttcctcagactcagttcttgcaacccaccttcaggaacctttaactggccccctagactaggagaggctccatcttctttgtgctcaccgtaatctatccttccctctgtcattgcatggagcatattacactgtatctttacaaggctcctagacaaacacgcctccttccctggccaaagatctcataaagacacagaccatgttacatttgtcttagcttccctaggcagtgagactccacagaaccttgctagttgtgtggggtaacacggtggttagggacacaggcttcagagctagtcagcctcagaatctatctcttggccattcactagttctgcaaacttgggacaaccatggaaacgttctgggcctagttttttcatgtattaatggctatgagatagtgtctatcttctatgcttattgtgaagattaccaaataatgctgaacagaggacctaaaacatagtgaagcaggacgtttccctgaccccttcactggactcgcaacaggggttcttcctttactcagcccactgctctcaactccttgtggagggagcgtacaagtgaacaagtcagcaactggagtacacaagtgctagaaccagtcggccattttggtgccggtaggatcaaactctaatcactagacctgctgcacacccttcacaggagggagtgcacaagcgagcaggtacaggagccagagcaagcacttttgggcgccagcaggagcaaactctatgcaggccccatggcagcatccaggtggggtgcctgcaattccggaaggcccagagggtgtgttacagtgctttcagctctgccatctgcagacagcttaagtgttagcagctcagtgggcccatagctaccctctgccaactaaggcaaagagccagtgtgacagcctcctgtatctgcactcatggctcccaagctcttgtccagcatccaggaaatataaggttgcatgaataaattgaaggatggtaaatgtgggggattttattgccgatgaaagtggctctcggtgggaagagaagctgaaaagagtacagtgtgggggaagggtaggtaatcttcccttgaagtctggccatctctggctgaattcttttttgaagttatgccatcaagctgttcctctgaagtcaagccacttctctccaatcatccggctgcttctcccctctgctggctgagtatggggtctttacaggcacatgatgagatgcggtggggccatgggtggtttaggaaaaggcaacatttgagcaggaaaacagggatataagttctccttttaggtggtgatttcaggctttttagcttgagggtgagattttgtcagggaccgacccttttctgcctagaatttctctgttccctgtccccatcaatggtaaaagctcaataagtgaggctttatgaaaaacagaaaatcagggtagtattaaagattccccaggtaccttgcagcaaataggaagagagaatccccatgaagaaggctttttctatgtggggacacatatcctgtgtctttgctgctctatgagtattggcctgtttcccatgcaaagtttgttcttccccatctaggtgggccctctgcaaacatacgagattatatttatctttttaaagttcttagcaccaatattgtaggatcaatacttctgcctgaagtaaataggatcaatcaaataatgactgtgctagaaagtagttggataatactcagggttcatgatttttttatttgatgatattgaaacacatctctttaacctcacttagcaaaagtcagaagtaaagtttgtcatggctttgaagaactttctatgggtcagcaaaccttgggacaatttcactacattctaggaaggcatgtaaactacctattggccagctactccaggcagcctttaacatatcacaaaagtaaatggtcattacagacataaaaataatggggtcaagagactcatgcttattatgacttgaattaacaactatgttttcacacaaatcttcattatttataactggcttagacaattatccctccttttacgcttgttggtttcttgtgttcaaaaactgcaagcagttactttattttgcccgaaggtctaaatttgtttcttccaacactaagccatttttcccaagtcttatttttcccttgaatttgtgtaaatacctgtagtacaaacgtttcactttaaaacagggctttttaaaagccgtttttctaggaaatattttaataatcagcattatttatgttgcctgtgtagttatgtaaataatttcagcctttcctcacaaacaactcttataacttaacatgccttcagaaaatgtgaataagattaccagataatgcctccccagtaagcatgttagcacttcaggaagaaaatgtgagtgctgagttgagaatgtgtgttaggcacaatgacaataacaaggaggattacaaatgaaatagcgctacaaatagcaccacagtttggaggaggaaagcaatttggtgaagtgaaagatgttaaatgttttaattttcttctatgccagtaaaatcttgtaaaacaaggtgacatattaaattttctatactacagtctctccaagagcctgtcaacattttcattgtaaactctattttcagagctttataactcagcattaagaattcactctggcttgacatttagagtgtaaggtcttacctggggaacatgtgtttcatatgttttaaaaattacgagtttatccatttctcagtttataatgagtaaacttttcacactttttcccttgtctgctgtgcctcagaaattgcagggagaaggcttacctatggtaaatcgccaatgggggaagaatctacagatgtggtcaacacaggtcagggctgctgattttcattactgaaactcacaaagagcttctgtagaaagcaaagagctctgctatgctgccctcaacatttcagactagactttgtgctatccaaggggtatattttaccacgacaaaaacctgactgattgcagaattcttagtcccctgtctgtttatttcaacatttgtattatgttgtgtctggcataagacctttttctaaagctttacaacatacaccctaatcttgcttctttgtttttaagtcttctttgcatgtgtttgtgtgcatgtgtgtgtgtgcatgtggtttattttccacctttctgtcattatttagcatagggaggttttcagtcaatattattcagtaatacggctaccctctttataccttgaaatacctacagtttaatctctggaagaattagtttttagaaagttagaattagaaaagggtgagggagaaataaacaaggaagcaacagaagagaaaaatatctgtggccatttgatatcagaccttaaaatgtcttgaggactgagtaactaccatggcttcccaaaaggatcatatgtgggttgtctaggaaaaaaatggaattccttcaataaaatacatggtagcaagtcttcagttctaggttatttcaggagaatcctagaaaatcatcacttcctgatatgtattgagaattatttcactcccacctaattgcattgtattttacatggctgacaaattatcttccaaagtggatataccattttgcatttccactagcaattaatgacagtttgttgctccacataaccttcatcatttgatgtcagtgttctgacttttgggcattctaattagacgcatagtggtatttcactgttattttaatttatcacttcctaatgacatatgatatagaatatcttttcatatgcttatttgccaccagtgtgtcttctttggtcagatatatgtgcaggtcttttacctgttttaaaattgaattattcatttttttctgagtgttaacaatttttgtatatttggtttgagagtcctttatcagatacgtcttctgtaaatattttctcctgttctggagcttgtgtcttcattctcttgatggcatccttcatggagcagaagtttttaattttaatgcaattcagtctatcaattatttctttcaaggatcatgcctttacatattgttgtatctcaaaagttgtctaaaagccatctctatacccaagatcatttagactttcttctatgttttcttctagttttatagtttcatattttacatttacatctgtgattcattttgagttaagtttgtgaagtatgtaaggtctgtgtctagattatttttcttttgcatgatgatgtccagttgtttcagcatcaattgttgaataaaactgtctttcaccataatactgtctttgttcctttatcaaaaaccagttggctatattttcaaaacatttttagtgtgtttatttctttccatgtctattaacaccatccaaacagaaactgccatcatctcttgcctgcttctcctaaaacagtctattaattagttgacaatatatttcatacacagaggagagttgtcttttaaagcatttgaagttggtggatgattttccactgcttttaggatcaaatataaacctttagtgaaatataaagccctgtggaatctggcttcctcctgccatcccttctctctcttttcctctccttcctccccagccaacttcatttctgccaatttcttcataatgctccagccatatttttttttcacttccttgagcatgtctcacttcctcccacatcaagtcttggactatggagtaatttcgtggaaatcctaaacgcagctgcctttggtttagctcattgctctgttcattctttaaagctgttttgctgtttctttctctgagctatctgttgagtgtttaggtatcactgctaactactatcgcataccatgccctcaatgtccttcataacaattgccaattataatttcattattatttgtttagcacatgccttcctcactagagtgaaggcttcctgagagcagtcagaatcatatctgtcatctttgctgttgtattcacagtgggcacagtattatagtgtctgaatgtcctaccagagtcatgggcagtgactgaactggaatcatcagaactgcagagccaaggagctgagggttaagctcaagattactggagcccaggacttctctattcatctaggagtgaagtaatccaatgaaaagtcaaaagactttagttatcagtgtacagggaaaacctagagaacaaggacttggtgagtcatggaatcttggacttagaaaagataaaagtctgcatgtagaagtcagtagttttaatagtgatctcacattcagagcattacatgattcagggttcatcttccttcgccatccttcaaagcacatagtccagagatcatttcgttttctatacatggttcctcacatgctgaggaagacgggacaatgttcttggcctctccttcccactgggcctccacaggggaaaattagcagcattcattttttccattttaaagaaataatccgcttttcttttcagaaagcagttttccaatgctctgaggtttacgttcatgcctcactgggcctgatttactcagtgtcatctgagcaaagaggcgccctgggatggcccagcattagagctggtgcttgagcccagatgcacgcacagaatggtacatgaagcaggcagaaggtggagaccatatatttcttttaatgcagtaaagaaaaagtattcacatagaatgaatatttaaataaatgagtaatgtaattatttttcagttccattcaattaaaaaatatttattcaaattaaaagggaatatgcctgagccccttactagctgacattggtgatttctctagcgctttctcccttagagagccactagccttcttctccttccagaggctggggatgctctcacttttctttcctatactctatggagggacagataagcaggaaacttcctctacatagaaacactagtgagtcaatttccaaacccagagacattttggtgcattacactcactaatataacatggagacattgttatcagagaggtctctaacaaagttttctctgtgctattttatctatgtgagggaggtgggaatttcttcaatatcaaaaacctcctttaatattgagcagttttttgcacttgatcttagccaaaaggccaagtagcactgaaatgttttttgtttgtttgccccctccacacaccttctctctctagtcacctctctcatattttaattaactcgtaagttcagtgcttctcaaatttggtgtgtaacagaatcttctgtagaaacttgtgaaaaaaaaaaaaaaaagaaaaagaaagaacaaggcccaggtgttctatctcagtgaggctgttgtctttattagctccccaggtgattctaatatataccaaagttttaatatgtctatggtttcatgtttacacgagataacactatgctttgttactccataatatcctctttttttcctaatgtggttgtttactcaatgatacattctttttacttactagagttgaatcatttttgattcttggaagctattaactatcagattctctttattagaagttattgtcatgacaaacacttaggtaaatggcgattttgtcaatttatgctgaatatctcttggtttaggaactttatgttaactgttattcttttaagactagaccattgtaccatgactaaaaacagacagtaaaccatggatatcaagagaataatagcgagaggtttgtaagtgtgtattgtggggcaccagcaatttatttttcagaaagccttattaaatgcatctctacggattgccatggtttatggcagaagtgatgtgatgatttgtattagagttttaataagtttagagttgaaaaatttattctgctttcagttccttccctctggctgacagttaatgtccaaggtacttaatcagagaaactaccatgggaggtctaataatactgtgcaacaaagggaaaagcacatctctaggatcaatttcagagccagctgtattttctccttaaagaaataataactcaaatgagataaggtcctgccttcaaggagatttcagtccagaaaaagatctgatccatcacagtgcttttgttttttattatattgggtggtgttttgtctttctttatttctttctttcatggtaaggactcaatggaagctgaaattccccgaggagtgttttagcatcttatctctagtttcttgcctctaaaagttgaagttacagtagcacagtatacatgtttctccttcttgcttatcctggagacttcctgcttaaatatatattgaaatggttgcaaatattttcattgccaagaaaataaactgcaaattgtttggttgtttggcattcagagtgctatgggcatagatccttgatggcagattgactgtatggctatagctatcatatgatgactcttcaatccctttatgacttttatgagagaaccccaccacatcctccagaggctgctgtaacgattaacagcaactgcaaataactttgcaaaaggaaattatactttgagtggaagagcctagatttaaggtaatgaaatccctgaaaactatagcctatgtgttaagatttattctttaagttggttagatatcaaactatgattctggcctttgaactcttaatggtgaagatttttatcttacatgatgaacacattacaacaattttgttatctgaacattgagtaagttagtagccacaacgaagaggtcagccttatattttatatccttaactatgagttctatttcaagatgatgtattcaccaaatctttattagtttccccaacaatactgtgggcattgatataaaaagtttataggaattgaaaaattaacccccccaaatatatatctctatatatctatatctatctatttatctatctatctatctatatattttgagacagagtctcgctgtgtctcccaggctggagtacagtggtgcgatctcggctcactgcaacctctccctcctgggttcaagcaattctcctgcgtcagcctcctgagtagctaggattacaggcatgtgccaccacacctggctaatttgtttgtatttttagtagagacggggtttcgccatgatggccaggctggtctcaaacccctgacctcaggtgatctgcctgcctcagcctcctaaagtgctgggattacaggggtgagccactgtgcccagcccatatatatatatattttttaaaggtgggagtatatatacaaaagacaacaacaatttgtaggaaagataaatcagatacagggggaagacagatgaatcaaggctgttgaagctgcagccaaccaaatttccccaataataatttccacaggtggttgttaaatttaccagtttgtaattaccaaattgttgtggggcctggcaaaccactctgtaacaggggccccagatgcttgtgatattcagaatgattaggtaaactgtggcgtggagccatggctgtcagaaagtgtggtccctgatcagctgcatcagcatcatctgggaacttgttaaaaatgaaaattgtttagctttattccagatctgttgaatcaaagatgatggtggtggagcccaaacaatccatgttttaacaagcccttcaggtgattctggtgcacactcaagtataaaaactactggtttagaccaggcccagtttgattgcagttgatgtggccggctgaatgttgaagacgcttcagtaccaagaaaaaaccccaaggtaggagtgagggagaaagggcagaatgaggaagtggggatattaatgagatatctaattctatcgctgtagctacatcttcttccctgtttactttgtgcagaatactcaacaagtagccattactcccaaggtaaaagaagcagcatcttcttaaaaactgagtagactggagaggtcagagcagcaaagaactctgcattctgttgaaatggcaaaggttcccttgttcccctcgcagagtgtgtgatgggggtatggcttgcttcttcagtgccccgctgctcacccctctaggggagcatacagtcgggtcctggttactgcctgttttctccagccccactcatggctgctggactagcctttgcctgctgggaaaggttaaggagaggtgcccctgaaccatgagtgtctgcggctgtcgaggtgaaggcatatatgacacctctaggaatagttagtgtgatttacaccttcggcagctgagccaaatcctcactttacttagtaacattgctgtagcctgtaccaaaactctttacattgtaaagaaagtgataagagccatttcaaaccatgtgagagaaaagagagaaagtctggggcttttgaccagcccagttagagtggagttttttaaagcccggtgaagggaaacagagcctcttaccagcaggaaaaggtggcagggttttggaggaaaggcagacctgacagtttcccttcgtccacgctcaccttccaggatcctgggtgaggccccagttgaaacgggaaaggttcgcctgtccccctcgcagggtgtgtgacatggggagtggctcgtttcttcactgcctcactgctcatgcttctaggggagcatacagatgggcaggctatggggttccaaccccatggcagtgtctaggggtgaatgtttacagctcctgaagccccagtgggcgtgtgtgatacagggtgctctcttagtttgctgtctaccggaggcttgtgttaagcagctcaagtagactctctaccttgtcgcaaggacagatctttctgtatcccgggttcttgccttggtgtactggaataatcagatcacacgtgagcttggagaatgagtgcaaagttttactgaatggaagtagctctcagccaatgggggagccagaagggagatggttttcccccagagttgggctgctgggtggccccagctttcctccaactgccgggtcaaactctgcctcgtcccgccggtagatggcctgcaggcctgccactattagttggtgtgctcttctgccagagtgctccctcatgccctcttgccatccagccacttgtgtcttcttccgccgatgtgctcctcttgacgtctggccgcctgtgtgtctgcccactagggtctcaggcttttacaggcccaggatgggaatgtggtcttggaaaatgcaacatttgggtgtgaaagtaggagtgctcatgctcacctaggtccgtgagggtggagccccagccagggacctgcctttctctacccggcacttccctgcccccttcatttaaagggtcttcccttcccagcactcctgtatcactgtcatcaagatgttcccagcacaatagggaacttctttctcactcacactacagcagagttggatactgactttctccccaatcaacagacacaagcaaatatttcaactggctcacacttaatataaatttacaacagtatcaccagacatttacaaaatttttgcaacacaacagagaaaggcaaaagtgaacagtagaaaaataaaataatcccaagataattgaaggaaacaattttataataaatactagtactcttagaggaaattgatgaaacattgtacatatttataaaccaataaaagaaactccaaaagaagaacaaaaatgagctcttaaacatttaatttattatatttataacttatagttttaaaatgtattaggtttgttaagaacttagatattttagtagaaattttaaaagaaaaagaagggttcaaggaatacaggaagtctataagatctgttctatttttaaaaaagctggaagaaaaagtaggattaggtcaagagttctagagtatccgggtagcaagaaaaccagaaaagattaaatggaggggaaggacgtttacaaatatataaaataacatccctgagagatcttctgattgaaagggtctaccaagtgctgagccaggttgcaggaggtggggatgggcggggaaagcttatagtggatctactatacgatttaagaaaatgaaggataaataaaagtttcagagaaaaacgcacatacataccaaaacatactcagtctccctgtgactcctcaacaaactaagtgtaaaatcataaaacaatgttccttattactttgagaaaagttttctgcaaactagttatttaaacattcaaactattaatcatgtgagtataaaatacattgtcagatgcacaagggctcagaaagtgtctcaaatctttgctagaaagttaatttttgtaaccacgtatccaagaggagaaggtccttgactagcaataggtttgggactagcatgaggccaaaggtgcaagttcagagcctttttgtgtgtgttttgattttgtttttccattatgggattttttgcatttatttttactttttaaaaaattaccttataaaatgttatttatcttaaaattgagtgttttggtgccccgttaacttttatgtccacacatctgcctcgctagtctcatctcagtcctgtccttaactagtgtatgagtttcctatggctgccataacaaactggatggctgaaaaacagaagtttattctgatagttgtggaggccagaagtctcaaatcaaagtgtcaggagggaccacagtggccctgaaggccatgagaactcaggccttgccttctcaggcttctgttggccccataagttatttggcttgtggctgcttcactccaatctcagtctccataatcacactaccttctcctcctctgggtgtcttcccctctgtatgtccatctcaaaattcccatctgtgtgtctcactggatttagagcccaccatgatagcccagaatgatcatctcatctcaagatccttaattacaaaaatcctttaaaagaaataaggtaacatttacaggttctggggagtaggatgtaaatgtatttttttggtggtggggacaatattcagcccatcagaagcagcaagcagtggatgcaaaatcaggaaataataaaggaacattccagaaagatacctgtgcagctgacctaaagagtatctagtccagactaaagcagaagagaatctaggaggcagatctccagggaaaaaaaaagatttggtagaatcagtgggatgtttgagggagcaaatgaggcgattataaaggcaaatttttttaagtaagaaatgccaagtgtatctatggcagaaggtagatggaaaaatggaaaggagagctaaaagcagtggacaaggacagcagtctcttcttgctgtgtataaaatgaaagattatctaatcttgatagaaggaaaaacaaagagctgcaacaattgtattacttacaagggtttttaatggtcaccaatatagataatccaaatagcaatatactaagcgaagcaaatcgtggcaaaagtgaaccaaatcctcagctatcatactaagaagtcagtaaataatgtctaaagttgaaaaacttaaggaagaaatacactatgtagagacgtgaaagaagctgcaagtaaagttttaaaagttttcgatagagagtgaaactattgtatgcaagtttatttcctttggtgttttaaatgtgcactaatacataaaaataaaagaacttgtaacactttcttcagttgcatgccttgggaatgtcttttaatgaatcttggggtgtctttaataaatagaattttttaattttttgcattgtcttataatgcctatttcactattaaactctgtgaaccgttaacatttttttccaggcattggctgatacattattaaaatgcagtgaaatgaaataacataaaaataaagacattctaaatccaaacaattttaaaatcatactcaatagaccctttccccatcaaattgttgttaaagtttctaaaagcttcctttagatacatatttcccatatctcatactggtaacacaaagctcgcagattttgataattttgagaggcataatttgagtaattgcctagttttttctttttcttttctcgtcattaaagtctttagtagttttgtttttactgtcttgcctgagaaaacctttcctaaaccaaggttgtcaagatattctgttttattatcctctaaaagttttgtcactttattttccacacttaggcatcaaatacacatgggcattgtatatgataggagatagggttgtaattttattttaccttatcaatatccaattgtgccctgctcatcaactgataggatcatacttttcccactgctttccagtgacttaaaaacatatatgacatatcaagagtccattaatgtatgatgtgtttcaggactcagcattctgcatcagtgttctatatgcctagcataaatcaaatgtcaatttaattgttgtgctgagataagttgatgttcttggaaaattatctttcaccttgttcttttcaagtgtatgttggcttctgatggccctttgcatatccataaatctttttttttatactttaagttctgggatacatgtgcagaacatgcaggtttgttacataggtacacacgtgccatggtggcttgctgcacccatcatcctgtcatctacgttaggtatttctcctaatcctatccctccccaagtggcgcataccccaacaggccccagtgtttgacgttcccctccctgtgtccatgtgtactaattgttcaactcccatttaggagtgagaacatgcagtgtttgatttcctgttcctgtgttagtttgctgagaatgatagtttccaacttcatccacgtccctgcaaggacatgaactcatccttttttatggctatatagtattccatggtatatatgtgttgcattttctttatccagcttatcattgattaacatttgggttagttccaagtctttgctattgtgaatggtgccataataaacatacatgcgcatgtgtctttatagtagaatgatttataatcctttgggtatatatccagtaatgggattgctgggccaaatggtatttctagttctagatccttgaggaatcaccacactgtcttccacaatggttgaactaatttacactcccaccaacagtgtaaaagcattcctatttcttcatatcctctccagcatctgttgcttcctggcttcttaataattgccattctaactggcatgagatggtatctatttgtggttttgatttgcatttctctaatggcatgtccataaatctttagttgactttgatgctttctccattaaacatgttaagattttgattgaaatgcattcaattataaatttggaaagagaaattgacatctttacagttttgggatttccaatctatggatataatttactacttcatcgtggccttttatacctttattttaagtgttattaattaaccatcaaggtttttcatagctttctgcaggttcatttctagtacatcatatttatttttgcctgactctttacatagtatttttagttgaatttcatctgtttttcctttatatgagattcaatagatatgtagttatacaaattgacacaacccaggaatctagctcaattctgtgcaattctaataccttagcttgacattcttttgaactttacagttttgagattaataaaatttatgattgtcttgtaaaaaattattaattccagtttttagatatctttcaaaatatatagtctctagaggtatagggaagaaaaagtaatattttcctcatcatagcaagggtcatggctgtgacttctattaataaaagataataagagaaaggcattcacatttacttaatctaagttttatatgacacaggaacctttagaactgaagaccccccaaagcagggaaaactgtgtatatttatgcttacgtttgatgaaaattggataattatacagaagaattacaactggaagaaaaaggagtataagctaatggtaagaaatgggagaacttagcaagtcctgtttattcaggttctttctggtgtccttgtgtgatattacttccctccaagtgtgaggcagaccacctgtcacgtgaaggtcttcaggggagaagggaggaggaaggtcagagacctttctgcttttgctgttttctcaatttccaagctgccatactttggagtagcatttcttgtaccccatgagagggaaatataaggagagaagtcttaggtggtgaaaagattgggattgtaagagtggaaagatatgatttctttcttccctcatcattagagttatgtatgacatttctacacaaaagacagattaacaagaaaaaaagcagaacaaatttatttcatcaaagtttttattaaataaagacttaaagacccagggaaagtgtctatttttatgttcaggttggatgaataatgctcagccatgtagaaatacaactggacaaaaggatctgatctaatgataataggttgagaaaggaaacctagcagagcctggctgtttgaattcttcttggtttcattgtgttgcattccttccccgcaacccctgcaacttccttgcaggcaaaggaagtcatagaattattttatggccagttatcacacagaatagtgcgggaagatcagagtgactttcttccttctgagcctctcccaatctatttcagttcaaggtactttgggatagcattctccgagctccaacaggatccaccaaactgctatctgagcttgattacaagtcatcatagacagttgaattttatagtcaacgtgtgttgaatacttctatgcaagtgtcattgtgaccgctgaaagggagtttctcacttagaggagctaacatagtatcaagatgagtaaaaagagtgcctctaacattgtattaatatatatagtattaatatttcatagtctgccatccacttcatcctccagtctgatcagtaacagaagttattgatcatttttcaaaacagcatgggaaattcattttatttatctcttataaagcttaataaacagctatagagatctttatgaagaggactttgtctcttgaaggacaatattctattttagtcttaaaagcattaaatttttcaatttttaaacaaaattctcatcaattggatgttatacccatctatttatatgtgagaagaacaaagcttatattactttgttttttttatactaccagggcatattttaaagtttgaatgtttaaacatacttggtcagttgaagagaatgactttcttcattactgattgaatatacagggagaaattttagcaagaagaatgtatgacttttttaaagaaaataatttctgaatgataaaaaggaccattttcccataaagacagtcaaggtaaaatacaattgagtagaactaagaaaggaaacaacctcttcagttaatgcattttcagagctaagcacaaaggtgcttcctaaacaaaaggatctttacaaatgagggtgctctttagagagaatattttcaaaggacccctatatagttcaacaggctccttcaaatgcagtgcattttaaaagcttagaaagtaatgatatgccctctagactgccaggcaggagttttattgtgaaggttttggcaacacagttcggtttgtagcatccgctttgaactagcctttcatgattctgagacacgtgcttataataataagtatttacaagtcaggagatgaaattcaagtttctatttttatttcccccatcctctcatctcctacattttatatattggacctaccctaagattgcttctgactctgcacactctagtgtcccaaatttattcctaaactctgcctctatcctaacttcttgcatacatactcaccctttctagccaaggacttgcattcaatcccaaatacgctgacctctggaatctcagcctttctccatgtgcatctttcttcctccatgtgtattcacttgaggacctttcatgcttgtgactggctgaacctggatcaattgctctgctcctgcttggctttattccaacctctcttgttcctctctaggttagtgtacaagaaaaatcagcatatccccaataatctgttaagtgagttgtgaatttgagaagttaaggggaatgtattccccattatactcttcgtataaacattttaattttaaaatctgacactctacctagaagaaatgggtggcagatttgcccagcaaggtaaatcatcactatttgttatatcatgtatactgttgaaaggcctaaatgtctttggacagatggtgccctgttagagtaaaggaagctaaaaacaagagatcatactgattcccagtgtgttagatgtttctaaaagtatgtgtatgtcataatgaaaaacagacctaaactaccaatactttcagaggaagcatagtcttagactctatttatcatttaagtgaataataattatacaagaaattcaatttatataagctgtcaattagaatgagttggacattcctactcgttctttttacagcaactgctcttaaaagtggtttaacaccgatttaaactccttgaatacagtaagcatatgtttatccagaactaaaaataatttatactactactcttttttttttttttttttttttttttttttttttttttacaacacaaaggttgaagtacataaaaatgctattgctttacacaaggcagcaaagttttaatcttggcatccacaggtgtgtaatgtgacttgagacctaacaacaccctctaattctttctgaatccttataaaaagtaagttatgtccatgatgttgatagtattattttttctgtaaaagacattgtagtgtttaaaacagatttctggtacagtccttgttctcaagcatttggtaaatagtctgacttaacaagagtcctcatgtctaatccctctaaatacaggcttatacttcactgtatatacaagtgtatatgtgtatgtattatatatagtgtgtatatatagtatatatgtgtgtgtatgtacacacacacttgtaaatacaagtaggtacaagtttatacttcactgtgccttacagggcaatacatacttcataaattgatgcataatgattgtgcatatttatggggtacatatcatattttgatatatttatacaatgtggaggaatgatcaaattggggtatttaggatatccatcacctcaaatgtttaccatttctttgtgttgggggcattttgactcttctaactttaatgtagtctcatgcattttgaaatatacaataaattacatgtttactaccacacactagaatttattccaactgcatatttgtacctattgactaacctctcttcatcctcctcctccacccttcctagactctcgtaactgtcattctagtgtataagtccatgagatcaactttttttgctcccacatgtaattgagatcatgcaatatctgtttctgtgcctgccttatttgacttaacatagcgacctccatttctgtgttgctgcaaataacagaatttcttttttatagtgaatgatattctattttgtatttttataccacattttctttatccatttactcgatgggtacttagattcctatcttggctattgtgaatagttctgcaataaacatagggggtgaaggtatctctttgatgtaccgattccctctccattggataaatacctagtggtgggattgctggattgtatgatatttctacttttagtcttttgagaaacttctgtactgttttccataatgtctgtactgatttgcattcccatgaacagtatatacgggttcaatttttctctacatgtttgccagcagttgttattttttgtctttttgttaatagccattctgactgaggtgagaagatcttctcattgtggttctcattgtgatgactgatgatgttgatattgaaaattttttaaatatgttttggccatttgtatgtcttcttttgagaaatgtctattcagatcgtttacccactttttaatagtgatatggctatgttgcttgggatatgtaccctggggttcatcgtctcatgctgagaaagaactcaggacccagacacatgtgagtgggttaagaagtagaaaatttaatagaataaaggagagaggagagcaggtcctagggaggtggagggggagagagagagagaagagaaggggggagagagagagagagacagagagagagagacatgtccaaaaaagtggggaggtggttgactgcagcagattttataggaaggctggagaaggtggtgtctgatttacatagggctcacagattggttgatcaggcacgaggtttacatagtgcacagggaagactggtcaccccaacctagaatgtaaatggactttccagttaatcgacaccatcttgattcctgttgattgacaccagtaagattggcaccatttgctctttactgtgcacatggctgacaaagagaagggaagatggagctgctatctttaacatgtgtagtccctagttactgctggcattcacctgtgcaagctcccagtttgcttgtctgtctgcagctctactttataggctgctctttgttagaaaatgatttggggctgcttttcattaaagagaaaagcattaccaaagactcccatgcccttactctctgcttaagtaatttcttaagtcctatatcattccaccctctgcagtggtaaccctaactgctgttagagaatgttggatgacaactttttctggctacttcctgctgaaaggggtatcatgtggggaaaagcagctagggctcctcctggggtcaatctaagggtcctcagaagaaaggtgtgtccatgtttgtttggtctgcagcaccatttgcagtttgattgctctcaatcattctaatgggttgtgatactggtttgcctccaccagatgctgctaaatattaatataaaagtaacattcttttttgaataagtggcattggatttgggtggctagagtaactttagtattgaccttggctaaatctttcctgcaattattaatcccctcatgacttctgcagaccatctaaggcatgtttaaactttctaacttctcctaagcatccttctttttaaacaaccaactattatttttaggacaagtatttaccatctttataatcctttcatacttcctttttggtgaaactattatccctgctataaggataataattaagcaaaatactacagcaatggaaactctgtgtccactattccagttagaaggtgctactgtttatagccctactgcaaatagcagagtgagtatagcaaatcttgcaagtgtggtgtagtaggtacattccacataaaatcttacttgccaagatacagaatttatctttgggggtctatgaagttccttggttttattttcctaaacaaaactccaggttatgggcatcctatttactttcactgcttggcaggatttgcaggataattgctcagaactagcatattaatccagatttttgtgttacccatccctttttgtttcttccaagctgcaggaaatcaccatttgattacaggaataagcaggattagtctaaaatgtaggcaaaaaaacttaaaaacaattaatgagacaaggatttaatgacatgtatgatatgctttggagcataacttttatctctccagtcctcatttttggtaaaaaaacaaattatgataggaccatgttgtttgtagaaaaaactttaaccttatacttggcctgattatttggaataaagttcagcaagaatggttatttctacatagctcttttggattggcttagatggaactcagttccacaaggaatcttagataggaccttttaaagctgagcccggccataggtttatattctctaatacctgtgagttgggtgatccttttctcttaatgttccaagataaacttggagttcgtggacctgttagaaagtgacattctttactgaccacaggttaggaaccctgtgtggggactgtgtagacaaggtatgaggccagtcttccccaaggggcttttatcagctctgcaagtcgagattgactccttaaagggaagcatatacttccagtcaaagccttgataaaataaccagttttccaattgtgtcccattgcaaaagaaaaatggattattattgcgatgatgcaaacaactatattgccataagttaagagtactcacagatagtttccaatttctagaggaactaggcagagagaaacatgctccaaattttgttcacagaagtataccttactcaattattaaaagctttaaaaagttaaaagtatgtttccttgagtctaaaaaacaaaacaaggatcagaaatacttcaagcaaaatattccaaaaaggttgctttaactttctgagtacagtccattagttaactcttgttttgtttgacacataaacatttcagttcttcataagtcccatacattctttctctattccaatgttacaatcttcaaaactattgaaaacctgcatttgcaatcacctgttaaggtccttaatatggcttgatgataaaccacattttgagaaggaacaaagcaaggtgacaattgtctgcaaatggtgacaaagtttccagggtagttagttaaaaacatgactaagaagtttagttatctccatggtttacaataattttacccttaattatgattgatagcatatactcagacattagaattttagaaatcccatgcactgttggaacatatcttagtattattcactaaaatataacttaaattgtacatcattttggcaatcccatgcaactaaacatgtcaaataatcctgtttacctcttttctgaaagtttcaggggccttctgagccatccagaaatcccagctcagggaagataatttggatactagaagtttgatttttgggatgcctgttaaatgttagagatttaaaacacttgatgttatgaaatagaatcccagattaccataaattatttattttgccaaaatgatgactcaaaaagcaaaaatcttttattagcctttactattgcatgaaaatcctgttaaaagccaaatttttacccttgcattagtttattaatgttaaccccaatgtttaatgaaacctcagacaatttcatataatcttaaccaagttgaacatgaggtgaaatctgtacaagccttttataactgcttttgctaaagaggaggttagtgtcttaagacagtcttgctgtgcttttatttcaatgctcaatttataaaaagaccatataataccctttgaatttagttaatgtttacacatttttgcaagattaatttttacaatcttttcacaacttaaatgtgtttagctttattatatcaaatttaagataatccctcatccctgggcaaaatttacatttccatgctttcttataatcttttactaaaagacaccttgcaaataaaactgtttagtgatttcaaacacatgttgcactgttaactctttgcaacttttaatgaaaaacctggttagtaagcaactttatgtatcaggtgtggagcctaggaaccagacagaattgcagagtaggtctgactccacatgtcccaggccttacctatctgtaaagcatgcagtatacaaccttggaacatttagcaagcctagtatctaagtggtatgattaagaccacctttttgcattttgacgacacttgcattttgccaataatccttaaggctatttttatttcttaaagattatagtcatgtgagctaaaaaatattttaagtgcttatttttctttaatcaattagagctctttttgtagacattacgcataacacatatatagcaacacagaattcagaactagtatgatttttcatttgccagtttcttattgggattattggcttcagggcggagcccttggaggaacagggccaggaaggcatgcatttctagggcataaaaaacaggcacagctgaaggcaaagacagaccccccaaaaatattggtgccgttttataatggattttggatccccaaaaggagggagagcctatgggagaagagagtatggtaattttaccatgcatttcattgcaaggcaacccaaatccattcagcttattttgtaatcagcccaacccccacatgattcttatgtcttgggggagtggggaagtttgtatgtttcaggtgaccaagagtatgcttctctgattcaaaagtgcaaagagttaactatccttccgtaactacgattagacatcccttaaagtatgttttctctctagttattccccacactaaagctctatcatgatgcgaggtaatttggtacctctaaaactcaaaactgtcagataacacaatgaaaaacagcaaagcctttggttttgagagggaattatctgcttttaattcctggggttttgtgagaaaaacaggttttttctcaaaagagagtttgtggtgtcacctctgtttttttcccaaggagttccaggctaccagaagttgtcttagggcctctcatgtgtacattaagagtggcaagacaaaaaatggagaaaaatgattcagttgactgagaagaaaaggctttttctaggaaagcaagattcaagaagagacaaacataaaggccttttaaaaaaaatctagaacttggatatctgctttgaattaagctgagcactctttaagaaaattattttaaatctcttgttactcaactttagccacgctaagcagttaagattttcagcttttgaactttataaaaagtaacctcacaggtgaaaccaacaagcctgagttagtttgtgacttaaccatgagtgtacaaggtattttcaaagtggtggtaagcagcttttgaaactgtcattgcaaaattgtgactgagacagtaaaggagatctgacccaaacaactccattttgtttccagcccctaagctatccttgcccatccctgagtgtaggctgaaccaactttgggaggagcctggtttacagtttatagtccaaaacaaagataatagccccttctgaagatatacttccctcttgtctggggaccagaccaagaaactagccacaagatcaggaaccatggctcaggagtcacgcagctgaaggctacaaaattttgaccctcccttaactgctctcaagatcagagtttaaggtattttgtaaacactgtcattgatagatcagctggtaccacctagatcaacaaactagcttatctgattttctggccctcacccaggaactgacttagcacaggaagatacccaccactgtaaaatggtggagactaaaagtgttgccacgtggttacaggtattgctcccaaagacatgaaacaatatggaagcctgtagccaagtttgttatagactgttttgttgggctggcatgaacaggaggcttatgggatcctgggtctgcatcctagcctaacatatgttttcttttgacagaaagacacacaaagcacaccagatttgctacagcttaagactaacctcacaaatcccttttcattaatttaaactttacagataatataaacaatgatccttgttacctcttttaccagtttgcatgggaagagagaggccaaaagcctgaatggtaagaaatttctacccttttgctggcatgtcaggcttctgggttcccttccccctagctcaactagagaagcattttaaggtttggaaaattaacatttcccaggttggaagaacattataaaaaaagatagccattttataccgtaaaagaaggaaccacaccatacaaaagtctgggatatcagagttgtcaaagaggtactgcttcctttcctatcaacagtggtgtttcccctatttcttcaccttcccgattttctcttttccctttttgcctgttataggagacatattgctcatctccaaaattctctgctgcctgcagaattgcctgtttttcacctacagttggggttaagctttggagcagcataacatccctccatgagaagtcaaatatctgagttaaattttagaaagcttctatatacctatcagggtcattagaaaattggcctaagtctccctttacttgcctaaggtcctgcaatgagaatggaagttgaaccctcgtggcatcacctccattggacattttctgcagggttaagagctaaggtggcggaatgggaaattttggagatggtggagatggaggagctggtggtgtggttggagctggccccagataatggggaatgaaagggccaggatgctcaatggctgcctcaaatggttcccccaggagttgcttttctaattttggggaattctctctgtgcctgtctgatatgattgctaaaagagccgggctgattttgcaatgcttgcaaaggtctagcaaaaaggcaatgcccttatgtagaagaaaacaagccactttttctttaaaatctcagggtgaaaggagttccagtgcttcagaatgcaccccaggggagtgcatgctgaagatgatacccatctagaaagagaagtgagaaaaaggcatctgtttagtctccttccttttggtgtgacccagagtggaaaggaagacagtggaggcgttccccctgctgttttttgtgttttgttttttttttgtttttttcctaaatggttcctgggtcctggcatcaccaaccgtggctgcaggcatgaccctcagccatagaaccagaggaactaagccattggggttagtaatgctcacccaagtggctctagtcctctgcttgtgattttgctttgacttcctggacttgtgtaacctgcctgactcctcaaaaaatgtatctcaggagagattatgtgacagttgcatttaagcatctgttgcactttcctccttgatggaggaagtgtgctgatttgagctctatatcctgctagtatggttcgtgttaaagcatctacccttagagaatggttccagttaacttccaaacttaaaatacccttactaattaagtactattctaaatggaagcagaatacgtgccttaaaagaaagtaggtatcaaatggccattttcctgctgatgggatagtattgacactaaaatctggctttggaggatattttgctcttaattgttgaaggtagagttttcccatttgcagaagcaacataaagcctggtctctagaagaggggtgcaataagggcaaagaattgggaagccagggtgttttgataaaggactgacaatgtgcctcatggagagagtacctattccactagttggtgctgttgaccttgaaatgccatgaactctccagaccaagggcagagagtgatgctcactgtggggggtgcgagggtgggggcctctgttcctagaaaatcccaaagatgcctacctttgagctatatccacagttactacaacattcccagatctttccaaacaagattatttccctgaattgtaaaacttcctacacattgcatacatagagagattaagagatgtgatggtcatggacgagaaaggaggaaattatgataggaaagttggagatcctgttgccaacaccccaccagggtggtcagaggccgaggtcagtccataagcctttgggtaacactcaggggtagccccagccagaagttctcagttgccccaggacttcttccagccccatacaatggctacgtcttccatgaaaggaggctggttcaaacatggcccatatgccatatgcccagaaacccataggtattgggggattctccatgttctctccagtaggtgtgacatccgagtctttaagaatggcaggcatgctaatggtatttttaaatggctggcagatgcctgttattgatttaatttgattttaaaatggaggctgaggcaaccattccagttgattctattccattctattccattccattccattccattccattccattccagttgattcaattccattctattccattctattccattccattccattccattcgggttgattcaattccaattaaaggacagattttgaggtttttctccatatttaccactcacatgattctaccttctgatccctttcttttagaaagaagtcaggacacagacacatgtgggtgggttagggagtggaaagtttaatagaagaaaggagagaggagctcttgtgtgtgagagacctctgataaagaggtgtggtggcagactgcagcagattttataggcaggttggagaaggtggtgtctgatttatgtaggacccacagattggtttgatcacatatgatgtttacatagcccatggggaaggattgtcaccccaccctaatcttatgcaaatggactttccggttgattggcaccatcttgtctgttctttattgtacaagtggctgacaaagagaagggaagatggagccaccaccttgaacatgtctagtcctagttcctgctggcattcacttctgcaagctcccagcttgcttgtctttgaggctcaactttacaggctatttattagaaaatgatttgaagctgctttttattaaagagaaaagccttactgaagactcccatacccttaccatctgcttaagttatttcttaactcctttatcagtagtatttgttttttggctgttgagttgtttcagttctttgtatattctagatatgaatccctagtcagatgaatattttacaaatattttctctcattctgcatgttgtgtcttcactctgttgattgcttcctttggtgtgcagaagctttttagcttaatgtagtctcatgtatctattttggttttgttgcctgtattataaagtcttggccataaaatctttgcctagaccaatttcctgaagcatttctcatattttcttccagtagttctatgtttttgagtcttatgtttaactctttaaccattttgagttgatttttgtatgtggcaagagatacgggtgtagtttcattcttctgcctgtgagcacttagttttccctgcatcattattgaagagggtattctttctccaaggtattctctttgtgccttttttaaaaaatcagttggctgtaaataggaggattaatttctcggttttctattaatctatatttctgggttttatattgtgccattggtctatgtgttttattctaataccatactgttttggttattatagctttgtagtatatgttaggtagtatgatgcttctagctttttccattttgctcagtattgctttggctattcagaatcttttgtgtttccacacaaattttagtttttttttatatttctcttgagaacgtcgttggtattttgatggggattgcattatgtctcttgaatctgtagtactatggtggcattgggtaggatggctattttaaaatattgattccttcaatctttgagcatgtgatgtgtttacgtttgcttgtgtcttcaatttctttcatcattttttttgtagttgtagaagtcttttgcatccttggttaaatttattactaggtggtgttttggtagctattataaatgagatcacgtccttcatttttaaaatctagtttgttattggtatataggagtgctgctttttgtatgttgtttttgtatattacaagtttactgaatttatcagttctgagttttttggtggagtctttaggtttttctatacataagataatgttgtctgcaaagagggatgattgttctttctttttccaatttggatgccttttatttctttcttgcttgattgctgtgctagcacttccagtactatgctgaataaatgtggtgaaagtgggcatccttgtcttttagttgttaaaggaaaggctttcaactttttttccattaagtacgatgttagctgtgttgtgggtttgtcatatatatggtctttctttattattttgaaataccttctttttattgttgagagtttttgtcatgaagaggtattgaattttatctttttgatgcctgttgagaagatcatatgatttttgtccctcttctattgatgtggtgtatctcatgtattgatttatgtacatggaaccatccttgcatccctgagacaaatcccccttaatcatgatgtattatcttttcaatgtgttgttggattaagtttgctaatattttgttaaggttttttgcatctgtattgatcagaaaaaatggcctgtaggtttttgtgtttttttaaaatctttgtctggtgttggtatcagggtaattctggccttgtagaatgagttaggaataactgtctcctctttaatctttgtaatagtttgagaataatctgtgttagttcttcatacatttgataaaatgcagaattaaagccattcagtcctgaacttttctttattgggacgcacctgatttctgattcaattttattattcattattaatttgttaggttttctatttctgtctagatcagtcttagtaggttgtatgcgtttaggaatgtttcctctagattttctaatttgtttgcatagagttattaatagtctctaatgatcctttctatttctgttgtatcagttgtaattccttctttttcatttctaacttatgtgggtcttctctttttcttggttaatctagctagcagtttaaaaattttaccttctcagaaaaacaagtttttgttttattggttcttggcaatgtttttcatttagtctgtttttagttctctaatttttgttatttcatttcttctgctaattttgttctgttttcttattttttctagttccttaaggtgcattgataggttgtgtatttgaaatctgtccacttttatgatgtcatttattgctataaacttccttctagcactgcttttgctacattccattggttttggcatactgtttttcgttcttattttttccaagacattttatttccttaatttcttcattgatgcaatagttgctcaggaccatgttatttaatttccatgtagttgtacagttttcaatattctttctattaaatattgttcaataatgttattgaatcaatatagaataaaacttgtcttattctattgctatatcctcctgctaatatgatttatttttcaatatatgaccttgtctcttcagtttttcatttaaattgttttctataggtacagttacttttttttttttgcttttggtttccatttacatggaatatctttttttatcccttcactttaaatctatatcggtctttataggtggagttagtttcttatcggtggcatatagctgagtcattgttttaaatgcattcatctagtctacatctcttaattggggaattctgcttacattcaagcttattaataagtgaggacttactcttgtcattttgttagttttctgggtgttttatataccatttgttattttcttatggtttatcatcatggtttggtgattttcagaatggtaacacttgattcctttctctttctcatttgtgtatctagtctaccagtgagttttatactttcatgtatttccatgatggtagatattatcctttcacttctggatgtaggactattttaaacattttttgtaggaaccagtctattggtgacaaattgcttcagcttttgcttgtctgggaaagactttatttttccttcatttttgaaagatacctttgctgggtctagtatttttggctaaaaggtacttgttttataaagcattttgaatatgtcattccattttctcctgacctgcatgatttctgctgagaagtccactgttagtctgatggaggttcccttttatgtgacttgatgctttttctcttgctgtttttagaattctgtcattgtctctgacagtttgacaataatgtggcttggagaagacatttttgaattgaacctatttggggatctttgagcttcatctatctagatgtctatatgtttttcaagacttgggaagtttttagctatttttattaaataggttttctatgcctttgcccatctcttctcctttgggaaattccagaattcatttaaaattttggtcattttatggcatcctactggtcacataggctttcttcattcattccttttttttttcttctgcctgcattattagaaaaattattttgcttagcctattgacacttgtatttttttatttctttgatttcttcagttctaggacttttggtgctcttaacatatctgtttcttttttgaatttctcatctagagcataaattgtttctctgatttatttgtattgttggtgttttcttatatttcactgaatttctcatcataaaatttctaataaggaattcaagataaagttcctgttttggggatctgttattgaagaattattttgttcttttggaggcatcatgtttcctttttttgtttcttgtgtccttatgttaatatctgcacatctggtgtaatagctgcttcttccaattttatggataggcctttgtaaggaaagatattttcctacagatgtattatagtattggttaagtaagttgctttggctttgattttggatgggtatagcagtgtagtctttgtatgacttcagttatattcagtgtcagcgatatctggaagtacctaagtggcttagactgcaattgttaatggaggttgtggtaagactttgatgggggtgggaacatcagctgggttagttcttgtgcaccagtttggcagcagtacaaatgttgggtctgacctcaggcctctggatggtgtgtgcaggcaccagcagtggtaggtaggttgaacttatactctgccctgtacaatttgtatgggtgctggcagcagtggtgatgggtgggatggaacccccagtggtatatgtagctgctggctgtgatggatggggccaggtccccggacagtacattcacatgcaggtggcagtggcaatgggaaaggctggcttgttctcaagccgcataaaacacatgtgggcaatagcagttgcagtggtgtgtgaggcaggcctgttctcaggcaccactggtggtggtgggtgcactggacctgttagacctccatatggtgcctttggagggcagggaagattaatccccagatgccaggttgcttgcacgaaggttgcttgcacgaaggttgcttgcacaaaggctacacatagcagcttcttcctctggtacctaatgagatgttgcatagggcaaccatcagtatcagatagggtctgtcaatacccaggcctcgaacaatgtgtatggcaaggcaagctttgcaatacataatttttaagtgacttaatatcaggctatatcttaagatttatatgtctttaatagagtagagaaaacaaaaatttggaaaacatttccttactgagtggtagaagtagcagactagtctttggctgatccagagagactgcagaggaagtttcttttctttttaaaaatgttttaaagacagagtctcactttgttgctcaggctgccctctgactcctgacttcaggtgatcctcttgcttcagcctcccaaaatgctgggattacaggcatgagccactgcacctggccccctgcagaggaactttctaatacaattagaggtgtttttctttgttaaaaaataaaaatccaaatactttctgagttgaaaggaagctactctaattggccaaagattatttataactgtgtctgtgaggctagttaggctaggaaaaaaacctgaaaagggtgagtaggaaaaacaataaggcaaaggagaatgcagtgaggtggaaaagctgtatttagagccccaaaccattcgtatgaagttttgtatcttttttttttcttaaggtggagttttactcttgttgcccaggctggagttcaatggtgggatcttgtctccctgcaacctccccctcccaggttccagtaattctcctgcctcagcctcccgagtagttgggaggtgcctgccaccacgcccagctaattctttatatttttagtagagatgaggtttcactatgttggccaggctggtctcgaactcctgaccttaggcaatctacccacctcagcctcccaaaatgctgggattacaggcgtgagccaccgtggccagccttatgtgtgttttattaatgtttgaaataaaacaggaactattacaaactcacatgaaatgttcttgtgatgcttaatacatatagacatatttctaaagattttcttctgaaattagaagccatctaatccgtggctacttgagacttccattaatttatacacattcagcggagctaacattcttatgatccatgaagttgtttatgttgtcctgcattgaactgcttcagattgctatagtttgaagtttgggaatttggggagtaatatactcctcattttataaaaaggaaataaacttcatcaaaggtaagagaatttttgttttgtggcatgatatattattgctcatgggtatacatgtaacaaggaagcatgaaaatgagaaggtgaaaaaaagggaagatctgtgacttgcttaatattgcacacctacaattgggcaaaatcaaaattgaaaaccaggtcagtctcatatcaagtcacatgttcataatcatgataggctctatccagtaatttcagcaattgtacccaaatacctaaagttaattccactttccaaatacttgtatggagcccatctggcacccatgaatcagtattttagaagttctctcaaatggctcggtgtccaagtgctaggttggttactacaaaaagcccagcataattgatttctgaacaattgccaggaaataaacaccaatctattaatgcagcttgatttctgatactttgttttatctgttaataactagcaatataataataatgcctattataattgaatcacttacaggattaatgtcaagtttggctagtttgttgttgggtgtggatattttaagctctaattgttcttcagttacatcattttttccacttgacggggaactctgtaagggcagagatggtagttcttcactttgaatcactaatggctatcaaaattttaagacgtagtagttgtcaacaaacatttgctgaactagtttaaataatttttctaaattatacttttattatgataaatagtgatagtattcactttcttgtggtgttcagtgaattaatgaaattagttactgcagagttcctagtgagaaaaggcatccatgggtcctactcaataagtaccttcagcaaaatctgttctgaaagtcaaagtgttccccagctaatactgtgatgaaaatgcctgcagaatcaaatgcaatatgacattcaatgttttaaatgagtcattaaacaaagaatattccaatattgtgaatcttctgtgaagtttttacagactgatggaatagaaaagatagtattctatttttacaacaagaaatactgggagatgcactacaaaatgacatttccagtgagatttgagcagcatcttatctttcaatgtgttctttattcattgattcagggtatcattcctggggtatataggtgaatatgacgatgataatatgtctggcagtacatagattgctatccttctcagttgaaaatggtgttgacggtgaggttagatgcagataaaaaataatctttgtgtgatagcattttcaacaccaaacagatgttgcatacttatgaatcagtgacttctcataagtagcaaaatgtacattgtgttaacgtatcaccttgttttcataagtacaattggttcctgagaggctgcagagtatagtagagtaaaagcaagagaagttttcttttttctccctgatgtatcagttattgttgcacagcaaactaccttagacgctgtggcttaaaacatctatttattttattcataattcactgggtaattctactggtctgggccagctggactggtataattatgcacctactataagctggcgtattggcagggtgcatcattgacaatagccttgttagagagataggagcctttcttcaggtagtctcatcctctggcaggctagcttggaattgtttgcattgaaatcccatggagattgcagggttccaagagtgagagtctcagtgtgcaaggtctgtctcttgagtcctgggctggaactttcaatgtggcttctgctacattctactggtcaaaacccatctcaaattcagctgaggcttaagaattatagaagtacactcttccctatgatgagagtggaagaggttactaccatttttagaatttgccacagcttctattgtaattctcaaaccaccctcttcaagaagtcatgtcttttagtgataaccataaccacaactacaacagtaacaacagctcacacgtatggaggacttaattgtaacaaagcctattctaatgttttatatggattaactcaattttcacaataacaatgaaggatgagtattagtttttctttatgggtgaaaaaaaaattgcctcacaaaggggttaatcattttacaaaacattaaaaatttccaaaagaagattgccttagtcaaataaatgcagaaaatgcaagacaaaataataattaaaagtctatctatgtttctatccatacaaccatttatcctcttggacttctcaaagttttgaatgcagtaaagtatattttgaatcttacagaagggaaagaaggttataagccacgttcaaatttggaatctaggaaccccttcattttgcagagtatctgttaacatcttacatgacagtggtattctatggaactgtttgtaaaatgctgtaattaggctttaaactagattccaaattgccctgatttgtagcacatgtatctctgtcactgagactataaagaatataaaacatgcaatatgcctgctttttttctctatgtgcttgtctgttcaaaaaatcagtgaccctttagacatgcagaagttaagccagatgtgtctatgaatcacctcaagggttttaagccaagttattttgcattgcattattctattctttttttttttttaaccattcccttcttttttttatcaacatccctctgagcagtaacacagtattactgctctaagggatgacagttggcaaatagtactatagcatggcaataagatacagaatgaaaattatacctgtgtcaaattgcttctgaatcatttacttcaagatagtcaaattaggaagaccacccctgagccatacagatgaggcagtaggttggagaaagttatctctagctctttaggttttagtatctaccgtttaatattgctattgccagagtagcaatctggaggagagttttggaatcaagattaggctacagaaggaatttaaggtgtgtgtttttgtatatatacatatacatgtatatatataactgtacgtaattgacccttgaacaaaacagggttagccatgccaacccccacacaatcaaaaacccatatataactttttactcccagcaattttttttttttgagacaaggtctcactctcttgtccaggctgcagggcagtggcatgaacagggccgactgactgcagcctcagtctcctgagctcaagtggtcctcctgtttcagctttctgagtaatcggaaccacaggtacacatcaccacgccaagccttttttttttttttttttttttttttttttttttttttttaatggagacacagggtctcactgtgttgtctggactggtcttgaactcctgggctgaagtcatcctctagcctcagcctcccaaagtgtaaggattacagacaggcgctactgtagcccagccctgaaaatcttaactactgatagcctattgttgaccagaaaccttgctaataactagcataaacagttgattaacacatactttgcatatttgttatatattgcattcttgcaacagtgtaagccagagtaaagaaaatgttataaagaaaaccataaggaagagaaaatatatttattaaagtactgattaatactgtaggtttatatcatgtgttgacaagatgaataatctgtctgaagtggtgggcaatgcagctgcagaggtcaatctacagtacatatcaaacaattcggccttttcttgtaatgtcatgacttgtctctgcctcttgggaacactttgaacatcactagtggcacttcgtatgggtcccatggtgttattcaaggtttacaatattgcactaaacactatgaaaaatatacaagaactgcaagagatcactttttccatgataaacaatttattgaagagatgaactgctctgtggagatgatgagcatcacacggcattttaagtggatactcacaacacttgaactcactgcagtaacaatgggaggtggctatgaaattatcacagtagtacaatgtgtactacagttaattttatgcatttattagttaatgctgcattctgtttacatttctctctactgtgaacggtgccatgtactgtctgtgcacattttaactgttttatactagatttgtgtatattgtagtaaatgataaaatagactagtacctatatattatatacatttagagtataacttagttttactttatatttaggctacacggtttgtctgcaaggttttcaaattattgcaaatctccaaaaaaggtttccaaaatgtctattgaaaaaaatctctacatataagtggagcctcacaattcacacctaggttgctcaagagtcagttctttatataatttgccttagagaaacaacacattcattcaatccacacactcatggacctctccaggagtttgtaaaagaataggtaatgacctaatattaactaagtaaatgccagcattttatttaatcatcaaaacaacacgatgaaatagatatttttaatcctcatttttacatatgtgatgacgttttgctggggatgcagcaccagatgggccagtccttgggcaccagcatggtggtggtggtgcgaaggctgcacctggactcgggcgtctgggtgatgtgtgtgggtgccagtggtggcatgtagggtagattgataacctggcccctgtacaatgtgtgtgggccaccttgaagaggaagaatcacaatttttacctccaatattttttaaatggcaccactaaaaccaaaacaaatcattaaatgtatttatatcttaccatgtgtcacattctgttaaacactttacattcttcatcttatttagtgtatacaactttagaagttagttctcatgatttctttttaacgaaggaagaaactggggcttagagagtacataaattggtcaatatcataccatttgtaaataacagaaaaggtccatgatttaaagccaggccactcatgaccaaaatctgttgttcttcattaaataaaacttcaacttatgaaatagtttcatctacattgtatcgttgaatccttaaaacagctcagctgggtcagaagtatcatcggtttatagacaaaaaaagataagaatcaaaaaagtttggtaatttcccccaaggtcataaagctacaggttttttgttgttgttagtttgttttgtttttgagacggagtcttgctctgtcaccaggctgaagtgcagtggtgcgatctccgcttactgcaacctccaactccctggttcaagcgattctcctgcttgaacaggagaattctctcagcctcctgagttgctgggattacaggcatgtgccaccaagcccagctaatttttgtatttttagtagagacggggtttcaccatgttggccaggatgatgtcgatctcctgacctcatgatccacccaccttggcctcccaaagtgctgggattacggacatgacctactgcgcctggccctaaaatttcgttttaaaaaaatatgcctggtgtttcttctagttgtccatatttctttcttatgacaacagataaaatacacaaactttatattttcatcaggatagatttttttcaagtctagcctctgccactaaatgtgtaattttaaacaaatttcttaatctctgtgagcctttgcttcttcatctctcaattaagggtagcaattctagctgcctcacagagctattgcaaagtttacatgaaaatgcatacaaatatgtctagacaagtgcccagtgtgcaggagagactcaatgtataatctctggctttccttctctctgtgcctttcaacgcaaatggaatagtttcaggataaagaatggtcagcttacataaccaagtgaggtgtatattaacagctggcaccaaaagtcatcttaggaactttgtcagaatatcttcataagcctttgtggaagatgtgactctgacagcagagatgtcaacaggagaccaagctataaaaggagaaggttagatggtctagataaaaaaaattatatgaatttttgttttgctcacaaaaaggaaggaaataagagacgaatggagaaggtagggaggagagagaagagccagagaggtaggatgaggtgaggatatatgtgctggacagccaggtaaaattcttccacaggttatagaaagatattttaaaaatgggacatacattgttaatttaaaattgtttacattaccttgatttaaagtctaccaaagaaactactttcagtaaagtctaccacaaatgaatactagaaatgaatgtttcatattctatatggattaccatgacttaaaccagaaatacataactggaagtagaagggaattcaagaatgtaagccaccctcgcattctcagaaatctgggcaacttgaggatctaagacaattttcaagggatctcaagagataggcagtaccagctgacatgtggattttgtgtttagttgaaatatcctctttttatttgaaagtccacttaaattcactgtaccaagaaatcattttaatttcagcatgatttagatacatttgaaggagacaaactgaagatattaccatgcttgaggtttaaggtgatgaaggacttttaggcatatttgaaatataccccttaactgttaacattgacaccagtggtaagaaatttcctccattagataataccggcttgaataaatcagaagcttgctgtgatggatcatttctgtatcttatttgcagttaatagatattatttcttagagcagtttttggttcactataaaaccaggcagaaagtaagagacttcccatacaccccagtccccatacgtgtaaacctcgctcccgtcaacatcccatgctctagtagtgatatttttgttaaaatagatgaacttacattgatacatcattatcacccacattccatagtttacattagtgttcaccgttggtgagtctttgtttttacctacaaacttattacattggtagtgttaccatcaagccagtgctcaccaaaatagggtctttacctttttagtgccctgaagctaatatgcaaaattgaaagtgaatgcataggctttatttgatggccatgaaattgagaagcagaagctgggatcacaaacttctcagtctgtaagagccagaacttcacagataaagggcatctttaatgaagtggttgggcattaaaagaaaggagaggaatatttgtcttttctgggaatgggtagagaacttcttgtaaccaattgccacctttctttctgtcactttatggcttcttccggttgtcatgattgtaaactatcatggcagtggtgggagtgtcatttagtatgaatattagattataatatgaagttagaggttcttcagaagtcaagtgagccaccatcttggatcctaccagtcttagccagtttggtcatgagggggaacttttgacctcaggcatcctgtttcctaaagatatgcagagttggttaggtgcagtggctcacgcctgtaatcccagcacttggggaggctgagacaggtggatcatgaggtcaagaaatcaagaccaccctggccaatatggtgaaaccgtatctctactaaacacaaaaattagttagctgggcttggtggcgcgtgcctgtagtcccagctactcgggaggctgaggcaggagaatcgcttgagcgcgggaggtggaggttgcagtgagccgaggtcgcgccactgcactccagcctggtgacagagcgagactgtctcaaaaaaattcagagttaaggtggagtggtactttacctaggtcacataggcattatactgggtaatactagacgcactgcgcctcctgcctctctagcacggtgagatgccccatctgagcatacatctgtagctagattgctgatgactaagtataaaatacaaccatttcccagacatgtgaactgtatggttcactgcaaaactgatatgctccctgtgatattaatacactcactcatatttcacactttgtcaaagagaaagctgcgtatatataaattcaaacatacatacttgattgttttaaaataatgacagcaatattgaaagcacagctattagtttagtaatgaatagcaaaaagaggatgctggaggctttaatggaagaagaaacattattacaactttgtcctcaggatctcgcttttcattacatatcagtctgaaataaatatcagtctaaaataaatcaattccaccatattcttctctttttgcctctggacaggtttttaccagatccgtatataatacttcatatttttaccaactctactgcaaacaggtgtttatcctctttgcgaaatgctgctttaacataggtgcagatttaaagagtttaatgtgattttacgttttcttattatgagggagggatcatccaatcatacacctcatctctcaatctctcctggatacatatgggaaatatttcattcactggtcgtttggtccagggaactgaaactcatcccctttcatgtgttaattcggactgataccacattaaatggctcaggggccttggctctggggttgctgtgaccgctaatgctttgtgttgctaaaacccacacatcaaatgtgatgccttcattttgcagttattccctagcaagtttccctttatgtatgagatttcacaagcttaggtgcctaataagaactagtagaatcacgtgcacacatatacaagttaggaggaagtgtttaggcactatctacctgaatctattgctatgtctaaaaggtcttgttctggatttttgaatcagaattattagtttgatgttgagccttgttccttcatggtagacttttgccaaatgatgtgatttgacatctaaaccactaggaagcatttcataggtgacataccagtagacagcctgtaattctgactaagtgactcaatcaagatttggcttttttttttttttcctacaacctcccacccacaaaagtctcaatatcatagattgaactataaatcttgtcatgaaaaacaaaagacaaaatagaaaacaattttataaatgtaaaatggatcactgttagaaaagaaaaaataaaaattggcatggtcaggaaaatacataaatggaaactccctattttggaagggataatgatggagaacactgttccaaaatacaatacataaatccaagggagtgtctcctgccacctgccagtggcaggcagaagtttccctgttgtacggactccttgctttaatcatattatggaaattcttatgattgattctgctgggtaaataagggtgtccttaagtttaaccccattgtctgtactcacttcttcttttgattgtcagttttctatattcttactttcctctcatgttctaagcattggatggtctggacctatgagattttagagcttctcaacggacttaatgaccaattaaagctctttcttaaactgtaaatttttggcatggggatcttgactaaaatgtttccacttactttaaccctaggtttatgtctacaaaagcgtatgcctgggtaatcctggtttcttgaggatgccatatgccaaacagtcagtaattgcatttctgttggtattgttgaccaattccctcatatcttacaggtttgggtgcagcagggatccagaaggaactgccaaaaatgacagctaggaatttgagggcatctttagaacatttgaagtttggcattttagtacaaatattgttattgttgctagttttaaattttgccaaggacataccctaaagtacaattaaacaaggaaaactagagataccatgtattttgttactgacaggtctttgttcttagagctcccaagatggcggcaggccactcccaagatggcagcaagccttttattctctgacctggggttcttggcctcatggattccaaggaatggaaacttgggccatgtggtgagtgttacagctctattagaagccatgggtcacagaagagaaccgtggaatccagtgactagtgttcagcttgattaggatgaacccgggcacttagctgctcaggaacaatggcgagcctttagccatatcgggagtggcaatgggcgacttgctggatcaggagtgcagcgaacacactgctggatctggaggggtggaaatcagcagtgggtctgtgatggcggcaaacagcagtgggggacggtgagtagaagctcaacttgtgccctaacaaacacagaccagaagagcgtgcagttgcaagatttcatagagtgaaaacacagctcccatacaatgagaggggacccaaagggggttgccactcccaactcgaatgcctggggtttatatctcaatcattgtccctccccctgtgctctcagatgataactgatttgactatttctttacctcctgcttttagcctaatttgtattttagtgagccctctacctgattggttgggtgtgagctgagttttacaagtcccgtgtttaaaggtgggtgtggtcaccttccccagctaggcttgggaattcttagttggcctaggaaatccagctagtcctgtctctcaatttcataagagaaaaatccttctaacaaccaaaaaaaaaaatatattctcaaaaagtttattgaaaggaaacaaattggatatagtttacaaaaagtcaccaaattttaattttcttaagacaacaggagctaatgaaagcatcaccaatgacccacttctaaagacaggaggaagagatgtatgggatgcagatagagacatctaaggcagggaggggatccaaaccagcacagagataggaaattctgctcataaatgggtggggagtgagaacgatgcaagccagggacccctggctggtgatgccctacctgggccttgctcagccatgctattatgccccagctcacctatgttatagcttataccaatctggcagttcctgagctattgtaccatgcccaagaacaataaggatgtgctgtatattgaacggtgaggagggcaaagaagaattttagtgcatgatgagacagctttcagtggagagggggacatagggatgttccccctacccaaaggtgggaaagtcccccatgtggctgggtctgaggtcttctatggactcaatggggagtgcgcactgattggttggtgagtatgcaaaaatggtcaaagcaaagataccactcaaaggtgggcatgacagtgtagaaaaccaattaggaaagggtaggtatttttgaaacaggtgaagggtagggatcaatcagaggaaagcacaccaaatggaagacaagttctcaatctagtctgaggatttaacttgtaacttggctttcaggcttcaaactgtcttcagctcggaggtagggtttcactgggggcccaccccagtctgcctaggtatttggctgactcctgtactcttgagagggatggcagatggcacgttgtttcagcatctgaaatataatgtggatgggcaactggaaagacaaaacagcagcagtggcatgaacagagcttagcacagaggggacaacacacaaatcgttgatgaatttttaaaatgtgggaaattgaacaattcaagctatagtctgcatttcaaaaaagatatgtttgcttaaaaaaacaaaaaacaacaaaatgaccccttcaccacaaaggatcagcctatatcacacacaggtacatgcaaactggcaaattgtcattatcgtctttcacaggttttatgaataaaaatgacctatgaatatttatatgataccctttttcttatcacttttggtggtattatgtaatgaaaataccagctcaggtgttgttatgggcgacattcattagtttgttgggttaactatgaggatgagctaattacttttaaaatgtgctttcatccagtgattcaacagaaaatacccatgctcaatagcattcgcttggttaagaaatgaaattgggcaaataacttatataaattaatgttggaaaattatattgaagagggactcataacttactaaaaatcactaaagaaaactaatttggattgagtaaaattttcatacattaaattgagtaactggtgaaagttttatttttttacattacaaaagaagtaaacaattttagtactacaaacacagtcataatcttattaaacataaaaagaattgatattataaattataagaagagatcatgctttgtagcttttcattatttttatcgaagatctgaatagacggattttctttttaaaaaatgttttttgcttcaaacttagctctaattctcttatataattgacatcaatcacacttttaattatctttatcgtatcaaataaagacatttggtaaatctgaggaaagaatgaaatccagcccaaacaaaatttcggtttattctgttattttttgaaatctcaactatgttttgtattttgaaaaataagcaaagccaaatttctttcaaaaggcaacttttaagaatttgctgtttttaatttggattaggattgagagccagcatggtccatgaaagtggtttgagaagaaaaataatctggttttcataagtagaaaccttgttgagttaggagaaaatcactcagtattttagaaattgattgaaaatgattgaatttagtttggagcactttttcttttcaatatgtaggcttacaaaatatagcatttataattcacctcagctaccctttctgatattatttttgttttatattttatgtgtgtttcaattaaattttgtaagatctttcttagaatgttattttccctttccaatgatcaatgtctatgccttgcttctaaaaatatatacttatttctctaaattgaggttgacaagttaattgtgatttcaggtaggagggaagacaagtatcttcagtacaaccaacaattcactttattaatgtttgtcttcaaggagagcacaaaggatgcatcagaaaggcagaaacacacatattgtgctcatcaaaggtcttaaaggccagagaagagaacttggcaggaaagttatcatccaagttcaattatttaatcttaaaaaacatatgatttagttagatagccaaaacctgggtagaactcagaatagatactatttattttcaaagcctaagggcatgcattttcagaaaactcagtggcttaaatagtgcttaagaatttacatttaattaaactggatgcaggtaatgggggtctgggtttcggctgtctcacattatgtacttgctgctcattgtgcccaaaggcaaagctccatttaaattcaacagatcttagcaactactgaacactgttgggctgagaatttgatagtgtatcaggctgggaacttacgcctctgggtaaagataggccagaattctgtgagtgttagcaatgatcaccagcaatcaggcagaaaccctagtctcccaaaattgtagagtggggagggtattcagtgagctgatccacttagtatttacagaaaaagaaacacatggcttctgaaactccaatgaagagaacacatgggcttaagatagctatgttttaaagaaaataaaatgatgtgaactttccttggttctgaaataaagttgaacttaatgatccctaatgatctttctctataaaatatcacaattccaggaaaaatcttcttaaattttctgatacaattagacactgatctctaatctttgtggtggttgtagttcactaaatgccacatgaatatgaatccacatttttgtaaagaatttgctagaatttgcagatgttataggtgaaaacatcaattggagtacaaatgtattagggtaaataaagggcaaaaagatggtagtttttagggagggggaacagtacagaatggcacatgagatgactcttgacattctgtatgcaaagtgggtctcatctggattatcaactgtcacaaaccagggatcatggtggattccacagtatcacatggtatggattaaggatatacttcacaggggacagtggaaacttaaaagttatatgtcgggaagaaaagacaatgtgtgatggttaattgtgtgtgtcagtttgactggtacacagtgtgcccagatatttggccagacatcattcttggtatatctgtgaggttgtttttggttgagattaacagttgagtcagtcaactgagtaaagcagattgccatccctagtgtgggtgggcttcatgtaatcaattgaaagcctgaatagaacaaaaaggctgagtcaatgaaaactctgcctgcctaactgcttcagctggatattggtcttttctggccttcagaccagactgcaatgatgctgcaacaatgactcatcttctgtcttgaggctgctagctttcaaattggaacttttactatcatctctcctgatattcaggccttcagacttggactgaaactacacataggctctcctgggtctccagcttgcccactgcagatcttggtacttcataaccattacaatagcatgaatgaattcctcataagaataaatcctattggatctgtttctctggagaaccctgactaatacacataggtgtaccctgttctttcattctcctagaggtgagccacagctaagatatcgtgggtttgtgttgcagtgcagggatcctgcctgccatacctctcctagccctgtgagtcaagcacaaggtcaacctcatcagtgaaggaacaaacaaaatattgggagccagccagtctggagtgggatagggcctatacatagaattttctgagataccagtagcctgactcctggagaccttgtgacccatgacaagtttccatcttgactgctgtgaggaggaagacacaagcagctgagcttaggtgcagtctctcctctgggagaaagagaactctgacacctcctctttcaggcaacgcaaagagagcaccagggtctcttccatacaatcttgatccttgtatcacaaactgatgatctatgaatagcaccatgaaaaatgtagtcttgcatacaagaaaaggttaagatagaaaataaagattgctaaataataggcaaaaaacatttagtatttactcaaatgtaatacgcttcctcccaaaattatagttcataaatttgtattgaaaagtaattggaaatataaactatttaattagaattcataggctatagaatatcaaaaagcctttcttaaactcagttatgatgggaaatgcatagatttttcagcaagtaataaaatgaagataggattacattggaaagagcaaattgtgcatgattctctgaatggaggaaaacagaagcaagattagttaagacgttggtacagtgagtgattaggaccctggaatgaggtggtgatggctaaaaaaaatgaggctatatttctgagttgcttgaaagacaatgggtcattcaaatgtggtgactcattataaatggatggagagaaatcaaatataacttcaacattgcaaaagtgggcaacaagaaaaaatagggacatcaaacggggtgggctgggggtatctattgtaggccaaatatagtaaaagactttatgatgagagataccatccaaataaaatgaaatacaggcttaataattttggtgaaatatggactgattagcatttgtttaatgagtagaaagttaggtaattgacatgaattgtgtcccctcaaaatacatgtgttgaagccctatccctcaatgtggctgtatttggaaatagggcctataaggagttgataaatgttacatgaggtcataagagtgggtccctaatccgataggtccagggcccttattaaaagaggaagagatagtagagcgctcacttgcgcttgccttctcacacgtacacacacacacacacacacacacacgttctctctccacgtcccaccacccccctgcccccctgtccccaccaatgtgaggacactgtgagaaggcagccacttgcaaagagaatagagcccttaccaggaaccaagtttgctgacaccttcaacttggacttccagagctgtgagaaattaatttctgctgttgaagccactcagttgctagtgttttgttatggcagccagagctgattaacacagtaactttcatgtttacaaaacaaaataattatgttttaccctaattattgtatttgaggcataaaagctaaaacatcaataaatcataagtaataatgatttattagataactatgatatatctccaatgatataggacatgttatataaatatcttgcaaaagacatcgacaactccagctggatttgctttagaaatgtttagctttggaattacatggaatgacagaatgtgtccaaaggccaccagtttgcacatttacaacagagaacaactttattaggctacagatagtgacctaacgtaacaaaaaagagataaaccaaccaattagtgaataataagtaatagcaactgataattattgtgcccttgcattgtgtcagatattttctaagcacctcacatgtatctgtttcggaaacttctgtgctagggagatactattattaatcccatttttaagatgaaaaactaaggcacagtgaatcagtaacttggtcacactcacacagctgtgaaggaaatgagtagtagtgaatgacaaaaatgctggcaattcataggtccagccattgtcatgcaggaaaaaggggaaatttttataaacattggttgaaaagttatactgaactgaaggaacttataaggcacaacacggtctaactctccagtcaacgaaaacattcctctctcagctgctctggtgggtcatccaggctcacagtgaatgttcccggcaagaaagtgccttcctgctttccaaagaagtccttttcaaggtggcggagcactgaatagtacagaattcatcagtatattgagttcagatcctatctataacttaggtacttttgttttcctgttttaaagataacattaagaacctgctgttttttcctctatagaatctggcatttacagcactttctcatcgatcacaccactgagtgttaccattcctattttacagagggaaatgtgaggctgagaaagtttggacaacatagccatggcagtttataactcaaagtatatggatggatgacactcgctagagagttgcaacagccgatgcagctgtccccaggccccaaactcacttatatttcctgaaacaccaggaaaagcatcttttatttttatatgagagccctaagagattattttcatcttattcaaaaatgaaaagattttatttaattaaaaaatctatttctattatcttagaacttttgcttctcagtgtcaaatatttttggttacctcagttactttttgcaaggtacagttttcaaatcccatttcatcctgattgtccttccctgaattatttaagtgtagtttagctacacttaaagcacagtattcgctaaaattggaaataatgttccagacgttatattacattgaccattatatcccttgatccaaattatttattgttgacaattattacttaagataataaagaataaacttctaccagaaataccagaaaatcaatatatacatatgtaagaatggaaaaatgaataatataaattatttactattccattgatcaggccaatcactttttgtgtaatatttcttgatttgttttctatgaatatttttataatatctgcctttatattacattgattattttgagttctgcttttcttcctttgcctcaatagcatcgaaattttatagatactcacaaactctgagaatatgattttaatgccagtccttcagtagtcatctttatagaaaatgctaagttaattataaaattataaatgatttggtgattagtatctttgtaaatattttgctaccttctcatattttaaattattaggtacatattttcataattgagatttctggcttgaaaagtatttgagaattatagaatcttttaagtcagtctctcttcctctttctaatatatattttcatcttaatgagtgatgacaatgatttttttcaaaaagaaaaaatgaaaacgtatttgcctaatgtgtatgtacacgcatgcatacatagacacccacatatttcttaacactgcatttttagaaaattcaaacttggatattttctttaggaaaactcccaatctgaaatataaaatgtttatatatatatatgtgtgtgtgtgtgtataatttatgtgaatacatataaatatacacatataatgaaatacagtactcaaggagaccaaaaagagaatgagggtaaagccagcttgtggaatgctttgcatactatgctaagtggattgttacgccattgataaattttaagcgtcatggataaatatgaaatgctacatgtcattgttttgaagaggtagtgatgatagtttcctaagtctaattttatgctgctggagaaaacagaatgattagaattcttatttatgcctacagaaaagaagctgggcacaggggctcatgcctgtaatcccagcactttgggaagccaaggcaggaggattacttgaacccaggagttggagactcacctgggcaacatatagtaagaccctgtctctacaaaaaatttaaaaattagctgagtatggtgacaaaaaatttaaaaattagctgagtgtagtggtgcatgcctgtgatcccagctactcgggaggctgagagaggaggattgcttgagcccaggaggtcaaggctgcagcgagctatgtctgtgccactgtactccagcctcggcaacagaatgagaccctgtctcaaaaagtaaaaaaaaaaaaaaaaaaaaatttaaaaagaagatgaaaagcatatatatcaaataggcagcattttggcaattagagccatttgtaaaatgggtgaatcatgaatcctattcatagttttatgcttactgagcttattgatgcaaatggcctgctctgggatactaaaagatataaaattgaatgaaataaggaacccaaaacaggtgaaggagaaagatcattagatcaatggtcaccaaacgttttatttaggtagcatctgagattctattggactatctgtacattccactcttcatgtgctaaacacatacttggtcatcaaaacattcagggaataacatgctaggaaatgcataacacagctaaattgaaagagtaatgggcatcaaagccatttggtgcaataaagaatcattacctccatgacagtggctagttagagaacagatacaaaaagttagagacttgaatcattctatcaattacatctaagacttgcattcttaattttttgtatttttctaaggtgattcatggagagaattagcttgtgacttaacactacggagttaggcaaataagcatttaagtgaacatcataaaactggaggggttacaaaagagataggagatataatctctaaacttagagaagtttacagtcgttttacagaaatattttgcatgtaggtaacccctgattaacaatacaatcaagtgctgtgttgtgtgggtcaatatgagctatagtatcaaaataaaagtgaagaaaccaacaagacaaagagctaatcaccctcctcttcccaaattaatcttcctcattggttctaaaatatgctttcactggtaaaatccagcaatgtcattttccgagcttgcagggaaaaaaataaattaataattttctcaattataaagattgtgcctaaaagtttttcttaaagttttgttgtctacaacttcctgactagattagaatgaaatggaagatattacataaattagctgaaaattatatatctggttattttaagtttattatatttttatttcatgatgtctgcaaagaacataatgattcatgtggtcttacacttaaagcttaaatgggaccactttgtatggtgcagtttaagagaccatgtgtttttgtgtttgaaaaaagataaaagacctgtttattaatctcttataatccagacgtcagttgttagtgaggtgtgttgtcttatttagtatgtttttgagtaaacctaaacctaattctccttttatatagcatgattaacttgtgaacttttttttttttgagactgagtcttgctctgtcgcccaggctggagtgcaatggcgcgatctctgctcactgcaagctccgcctcctgggttcatgccattctcctgcctcagcctcctgagtagctgggactacaggtgcccaccaccatgcccagctaattttttttttatttttagtagagatggggtttcaccgtattagccaggatggtatcaatctcctgacctcgtgatccacctgcctcggcctcccaaagtgctgggattacaggcgtgagccaccacgcccagccaacttgtgaactttcatattattttttcaacgtgggagtgagcatgattgttgggtaaataatttcctgtggacacatttggtttcattcaccccacttgacattccattgctaaagtagacttagatacagcagtcctcccatgaatttaatatatgggaaggttaacaagcagagtaaatgaccaagtatttgtggtgattgaagttgccaagttccaggaatacataagccagaagcaccttaatgagtgatgaaactgatgatgattttcctcaaaaagaaaaaacgatgaaaatgtctttgcctaatgtgtatgtacatgcatgcatttataaaagcacccccaaacacgttcctaacaatacatttttagaaaatttacacatggatttttttatttaaaaaagaagactccaaatgtgaaatataaaatgtttttaatgtttttgtaacctagccatacattcatgttttttttctcaatttctagagctcgtgggtccatccaaaattatactgaattatactgtttaatttagcccattcagataggctacagaattgaacaggatgaaaagggcagcagtatgatgcatccaacaagcggccgaccagaaattctgacctccagatgcagcattaagttcaaataggatcagtaaccacattaggagggtcaccagatagagaagagaggtgatacatcccagagttgattgtgaacatcttagctcaggcacacagaaatcaacttactatcattgttcaagtctaacctcagagacactagcaattagaagttaggaattcagggtagaacactggaaaacgaagagcctggaacctcccttccaaaatctttttgttagtgaacagcctattctccaccttccctgaactctgaacagctgaactcacctggagaaaaaaaattgcaacatctgggacccttatctcaaggcaaccctaagaagtgggtttactctgttttcgtgctgaatttgttctctcattttatgacgttatttcatagtttctcttctcttctctaaactctaatactctttcttctttcctcttccttatctactacattcattttctagttaccaaagaaagtgaagaaatcagaaaaaagaatgctgtcattctttcaacatcaaacctactatcctatctgcatctatgccaatggctccacttcccccttgttacctgagtggcaccacgttacttctatctaaacaacctctcaacatacattccacatgccctcccctctttccaaccgaggtgtattcctctcttcccctccttcatcatttgcttcactatatattagattgttctcaacagcctaaaaacattgtaatagtttccattaaaaatatatgctggcagtatattcctttcagatatcatctcatacctgtatttatctttgtagaaaacttttttgaaagagtgttttattgtgttgacttcattccattcttgtctcccttcatcattcattccggctttagcccccttcaatgaggcttttctctaatccctccattaagaccaatctcatgaaagtcatcagtgacctgcatcttgggaaatccaatggtctgcctcagttcttaattaaacttctcaaacttttaacctagctgagtacttctttattggaatgctgtaaatatttatttctgtatgtatctgtttgcttgtgtgttgcccttctccatcactaaaacgtaagagcaagttctgttttgtatactccttggtcttgtatcttgttttgtattcccaatgtctaaaacagtacttggcattgactaggtgctcaaaaatcacttacagaatcatttaaacagtcatgtatttgagtaacaggcacatgaagttataaacacaaacataatttatcaataagacaaatattttgggagtcagatgtttcttacctttagtctgtccagagccagtacagcctaaaattaatttggtaattgggctttagaatctcttcatttgcatttgaaatgaacccatccaatatgtccactgaactacacagcttagagtgaactctctccagttgacttaggataagtaagcatattcacagaagccattaatctggatccgtatcccatgaaaatataagactaaatcttaactggttttgtgaaactatgagcaaaaaagtgtaagccctatattgtcaggctattccaacaggcaataccactgaaatgcagtagctcctccctaagctaagtgccaacaaggagtgaaatgtgctaggtgcccaattagtatctctacctactgctcattccaaaggtctccaaccagctattgacctaaataatccacctagtttcaggccacagccaagaagtctatttatagctcagagtaaactaatagctgagctgagaggcctttttcttatttgtaattctcccttctaaaatgtaaggaaactaacataccagaaacacatgaaaattataagcccctgcaacagccaaattccaattctgcgttttccccctaaacaaaaaggaaacaaaatgttgagagaatgtcaagctgctaccagccacattcagcatacttgggatccacagttttaatgaaatcatttagcctttcaaccacatggcacttctttatctgcagatgaaaatcctggtttttagtattaaggttgtgaaattaaggttgtctttaggattaaggttgtggtggagatacaattttttccttaagttgttttcttcaaggaatttatccacaagaaggttaattatgacatatttttatagatgcctaagtgtaggatttgttttagcattaatggaccatctaggccattacagaaagatgttgggatatttaagaagtggtattttttaagaaagtaagtcaaaacatgagaaaatgaacttaaatagctagaatttataatcttttaatctgggtctgtgtcccatgaaaacataagactaaatcttaactggttttgtgaaactatgagcgaaaacgtgtaaaccctgtattctcaggctattccaacaggcaatacctctgagatgcagtgtcccctccctaaacttttgtttataattacagtcaacatttattgaaaatttttggactcaggccaggctttgtggctcacacctataaacccagtactttgggaggctgagatgggaagattacttgaggccaggagtttgagaccagcctggtcaacatagacactgtctctcaaaagaaaacatccgtactctactgaattctgggtggatcgacaagtgaatgcaatggtcctcactcctgagggtgttttacttcatatgatgaaaagatatattagaaatacatttttaagaaatgtattaatagtgtgatctatgataaatatttggcctaatttcttctactttctgagcagttgtcttggcacggtgaagattttcttgagttggggaatacttggaatgtcaaagaatctgtcttgaggctacctgctattttacttactaaggtgggagatgtaggggactcactcatttcaccaggatttattttttggacaaggacaaaataaaaatgagcttttataaattgtgttataagaaaattcatagatcagaatcatagctctgattatacttcatgactataatattttcatacttggtgtctgtgtttaataagaatgagcccaacaactaggaaagcatcctgttagtatcttcagggggtgtcctgtacgggatacataatggggtgcctgagtgagataaagcaacataaaacttttatgtccagggaacaacacgtatgtgacaaagcaaagggaatctaggactagagaaggtgtaatgcctgcaggttgtttatacagcttgtactatctgggcagtgagtggaaaacttgatgcaaaacagaataaggaaacatgctcgctaaaactgagcatggaggtgagaaaaaatagattattttctcagaaagggtgaattgcaactccatggccagttggtatctttccatttaaaaagacctccctggttgacttgatttattctcaagatggcttcgacacacggaaaagtgggtcacttgatgagaaatacgctggttttcaataaaggggaaagtgatgtttttttcttcaacttagttccagtagaagttccaaaataactggaaagttattctgtttcttttactctccttgtgtcttgtgaatgatggcaggtttatttcaaaattgtgagaaaagaaaaacagtggttggaaaacatgaagtggtctgtttattttggccattggtgagaaatgttctggaaaagctatctaaactgaattccagctgtatgtcactggatgctggcaggatttattggtgggaagttatggcaaacatcttgatggctttaaatctgtattcatagctagtatcttttgtgtaattatacttaaaaatcattaatttcaaaaaaaaattagagaatttctctaatgcttgtacattgagaggggaaggaagaaaaactagaaggttagtcttttgaactgctatagttttaaagatgacagaacccttcatctcagcaagagcagtggaagattaaaaatattagacatggccaggcattgtggttcactcctgtaatcccagcactttgggaggctgaagcaggcagatcacctgaggtcaggagtccaagaccaacctggccaacatagcgaaaccccgtctctactaaaatacaaaaattagccaggcatggtgacaggtgcctgtaatcccagctacttgggaggctgaggcaggataatcacttgaacccaggacacagaggttgcagtgagccaagatagcaccactgcaccctagcctgggcaacagagcgagactccctcatatatatatatatatgtcttgactaagaccagggatatctcccttctgttattctgaaggtctgcctattgaatagtcaatcctgaagataagcaagataaagaattaagaacaggaaaccacaccaagctctctgtctccatttaccccttagacagatgtttctttaagttttttgaatgagcaattcattattgtaatgatatgacaaagagaatggatgctaaccatcctatgatccaagtttatcagctacatgatattggtcagcttacattcctttatctcttggcttcctcactgttaaaatgcacatgattctgcctaactaataaggtacttataaagattacattagaatatgcatatcataccttggtgtctgaaaaaagctgctgtattactcttattaaaaataaaattaagcaactcctattcctcttaaatttctattttatataaacctgcacctaacatgtggaaattgagagaaatagcttcagttttgtttgccttttttgttatggtattgatttctattatagttatataattatagtatataatggaaattacctattttttgtctaaatcagtgacaatggatgcaaaaagtacaacactccaaggaagtatctctgcccttgaaatttctgagaaagtttcaacaactacacttcagactaatggaaaatatgatcataattgttttggtttgttttaaaaaaatcaccttatgtttaaagaacattatgaacaagcctcaaactgttctgctgctctacacacctacaagtgaaaatcaatatttctttcaaaaatttccatatatgtctcagataaaagttgcgctgtgctcacatttttctaatgtgacatatggttggtttcaaatgcatgcccaggaggcaaaatactgaataaactgtgatgacttatagtttagaaggttttctcctgagggggggaaaaacagcagataatattgttacaggaaatccataagccaaaaagaagtttcaaataactctttctcccaagtcttccacaagctgtccttaaatttttaaagagcacttgaataataaaatgtgttggttatagccccatttttcttcatgactaccctcaaaacatttactgaagatgctattttaagctgccatttcaaaatttttaccaccagtttgtagatgatttctactcagttgtacaacacaatagcatacaatattccctccattcattctgacatggatcatctatttttctgcccaaaggattgaagtgagaatggcatttggaagacatttcaggaacagttagggcaagagataggattaggtgtccctgtgcctacacggaggaaaataagtcccactcctctaccaaaaagaaaatttagctttactctgatgctagatgacttagtgattagccggccatagcttgaaacattttggagtcttgtttttggtagagaagagggaacattctaaatttcttccattctctttttttttaatgggaatgagtctttcccctttgaaggaaggggctggagtgcagtagtgggatctcagctcactgcaacttcggtctcccagcctcaagcaactctccggcctcagcttcctgcgtagctgggactgtgcgtgagccaccacactcagctaatttttgtatttttagtagagatggggtttcaccatgttgcccaggctactctcgaactcctgacctcaaattatctgcccgcctaagcctcccaaagtgctgggattacaggtgtgagccaccacacccagccaaaaatatgtttatcattttacagtcagccctctgtatccgtggagtttccatatccatggattcaatcaacccagataaaaatattcagaaatatattgtatctgtactgaacatgtaaatacttttttcttgccaagattacctaaacattacagtatagtaactatttacatagcatttacattatattaggtattacaagcaatttagggatggtttagggtatatgggtggatgcacataggttatatacaaatactgcaccattttatagcccggacttgagcatccccagattttgggtaactgagggagagatgactttatacgtgaatgatcagtctagcaaacccagccagggcctggagggggccctactcagtctcaggctgagaacacctattgaggttaggtaggtcatttaagttcattgaactcaaatagtcttttagtatttaaattccttctagatcagaggttcctaaccccaattgataagcagagtttcctagttagagagcctttaatagctacatcctgagcttcacctttgaggggagggaccgaaaacagcattttaaaatggctgaggtgattttgatatagcatagctagcattaatttgtgaatttgcatttgggaagtatatccctagagaattcttaagcaacttctctagagtcttgtcaaccttgataaccacacgtatgtttgaatatctcatactgcaaaactattatttgcctaggcagcacatgctcttttcagtagacttgactgcatcaaagaaaacaatattaaatgaaaatgcacctgcataaattctctatcaattggtattctgttacttgggggccatagaaaatctaattcctaatccacacaatagctcttctactactatttgcagacaatggcaggcacttgcatttcagtcatttcttctctagaaaaatatttctagttcatttagtctttatgtgacttgattttaaaatgtatgtattccccttgcttttctttgaatttacccctgaggtttctcaagtgagggcttcaactgaacacaagtcccagtggggctgggttcgtaggtgtgtgagctgcattatctcaaaggaccctccaactcaggtctgtgcttggttttgtgttgttcattgagttgaaatttatagtagtagtttttttttttcttttttaagcaagggcctccacatttccactttacacagaggtcacacaaattaggtagcctgtcctgtgtcccagctctagtatgatcttgtataaacggttcaattcccacatgccccatgctaatggaacatggtatacattatctgttttagtagccatgttactcctcagttcatactctacatactacgggatgcaactccaagattgttttctactacacagccatgtctccttcatgatggatttttgagattgttgtgggaaacaaatacaagatgttatattgattccagttaagcataatctttaaagatttggcttatggttccagacctattgagacctgattaggttctgattgtatcatccatcatgtttgttgtccctcttaactgcatgccaccaaaagacacttacaaccccgtcttataaagtgatgaaaaatatcatagtaggaagcatttaaagaaatatgaggaataatggttttgatcatgtgatctagttgctattgtcttaaagataccgaaagtctccaatttcagtagccagtgtgtaatctttattcttcttgcctaaaaatagtttgatagtctttgttgtcattgtgaataagaatgtgaaaatacttcagttgtaatgggggcttcggccaacagaagactcatttctgaaactatatggtatgaaaaactcacctcagaggagttataattatttaatgcaaatgtagaaaatctagtgtttctgtctaccttggcaatgacatcttttggtttggatgcttcagggagccagttactttagtaagtgctttggtgctgtatgagagaagacatcctcaagtgagaaaggtacaagagatgtgtaaatgttttcccacttacaataggtgatttctgaattatttgcttttattccaatttaatcatggaaagttttaagaaaagtaaaattgtttaagatgatgacagttttgatttcagctatgtatatggtcaggtaatgaaatatgattttgtttgcttatataattaaaatacaattaggtcaaattaaatactagcctggctagctgttatgctgttaattagaattttaaacagtatttggatactttaatcatttccctattttatctgagtaatcattccctcagaaatacagaaatgaaaacctcagaagcccagaaacataacattacatttgagctaacttttcttttcctacataaagctgcatgcattagtgaaggctgatgctcagtttcttgtctgagatttctcattgtactaaaacagattcaagggtgaacttacagtaagatccgtatgctggtaggaacaccttagtcctagttgcagtgctggaagaacttgttaatttgctttagatctattatttacccatcatctctaaagtgaaggagatatcatggcacatcactgaagtctctttaatctccaagattgtacacatctgtaaatttgtgaaatgcctccagagagatagggcagtataaatgattcatactattgattcacttggcaagtggaagggctgagctcagaaataaaaaggcaattctattacagttcaagagtctgacaggaccccactactcagacctcaagaagtgctttgtagcagttgaaaatgatactttaaaaagcatgtgtgagatctgtgttcacatgcatatatatttatgtattactcaccaaaaattactgagtgtatactttttgccaggaactgttctagatgctggggatatagtagagaacacaacagacaaagactctacctttatgggcttttattatgtggcaaaatataccaggtgttaaataagataagcaattctattacattaaaactagactgaaagtttaggcagcaaatgagtgggagggatctgcaaaagaaaatttcactttaaatattgtggtcagggaagcacccactgagaagatgacatttgagtgaagatctgcaggaagtaaaggtgcaagccttaaagatttctggagggatgatgcccagaaagagccagcaggtacaaagttctagaggtgggagcctgccagctgtgtctgagaaataacaaatagaccagcatgaagggaagtaagcaagccaggaagagaggaagatgcagtggagatacaataggaagccaaatagtataaagcaagcttgtccaactcgcggccccatgggccacatgcagcccatgaccggtttgaatgtggtccaacacaaactcacaaactttcttaaaacattttagatgctttttgcaatttagtttttttagctcatcagctatcgttagtgtattttatgtgtggcccaagacaattcttcttctagtgtgttccaatgaagccaaaagattggatacccctggaaagtcttgtcaactattttaaggtccttttcactcagagtgaggaaatggatgtcttactatttaataggatccctctggctgctgagttgagaatagtctatgtgcaagggcagaagcagcaggcatgttaagaggctattggatgaaattgcacagtcacacattatctttttctaatagactaatacctattactagactatctgtagcctgatcttctactcttgaattagtcactcatttatagatataattgttgactggtacaaaatgctgtcattgttctagactgaagttatttaattgtaactgttaatgtgaatgcccccgttgggacccaagaaacctcttttatctaccttcatagacctagggtaatccatttccattaaatgtaggtttatcaaacccctactttatatcaggcactattccaattacttggaataaatcagtgagcaaaggagactaatagccttgtcctcatggagttgaattttaaagggagaagacaaaaataatggctgcaataaacaattgatagagtttattagatggttatgagtgtaatgaagaaactacaatatagatctcagggcatagggcaagtctcggtattagtaggacattctgatcaggctttattaggaaaatgagatttaaataagactttaaggaggtcagaaagttatccacggagatttcttggagaagaatatttcaggcagaggaaacaagcagtggcaagcaaccaacagtgcaaaacctccaaggcataaacatgacggtcattttcaaagcatagcaagatgatcagtatgtctagagtgaagtgagcaatggagaattagtaggacatgagctatgattagaagtgagagccagatcatgtagttgcttggaggctagtgtaaggactttggattttgctttgtatgaaatgaaaagccaaagaaggagaaatatgatctgatcaagcacatcgttctggctgctgtgttgcgctggaatatgggagggcaggcgtgaatgcagggaagccagttaagctgttgcaacaatccagtttagagaggatgaaggctcagagaagggtgatggcagccgaagtgttgagacgtggtaacagttacattctggttatattctgagctgaatcaaacagaatttgatgacagattagatgtggggtctgagacaaagagaactattatgacaagattttggggcctgagaaactagaggggtggaattgctatcacccaagatgaggaagagtatagcaaaagaggatttattgatctatccatagttttgccttggacaagacaagtttcaacatttaagtgaagatgttgccttggcagataatatacaaatgtggatttaggatggaaaatttgggttgaatatataaaccaggtagtcatcctaatgtgttaggattatggtttacagtggggtttaaagccatgggcagcatgaggtctataaaggagtatctgaagatagaacaaaggaggccagtgcccgagccctgcatactcccaaatgaaatgatttaaaaagaatttttaaaaatcccttaaacacctcagaattcagcttcgtaccttcttctacatcagtaaagatctgcaatggaaatagtttaaacttttttcagactggtgggttatttagccatgcttgcagcatgatcatttcgggaggtactcaaagcatagtgtatcccaaacaaaaaagggaataggttttcctttacatgatggcaccagccacttggtagtgactgattggtatgctatgctgcagcagatgtggaggttggatgtgggtttcataggggaaagagcctcacaatggcttagtgaggccttccaagggagcaaaatgggcgaagcctggtgccatgggtttgcttatattttgcaaatctcataaatgagaactctattgtggggggctctgacttttggggatcaaactccttttaaagaattaggattataaataatacctatcaaaactctgcatgtacctgtgcaccctcaaacaaaaaccctgtgcaccccaaaatttatgcatataattttagtaagacttctgggcgtcttccgtggactcgtttaagaatccctgctgtactaactcaaaaacagtcttaatagcttaacacaatttctttccaaatgtagtcagtttcaatattaagtttggtagactctactatttagcataagtagcaaacagacatgagatagttattccactattattgttctaatcacttcatggagaaacttgccaagaataattaaaagtaatttgcaacttcattgcccttttattggccattgactttgcaaacagaatgtagctatggaccaagtggcacatgttcatatggtttgccagtttggggtacacttataaaatcttttcattactaatgtagtaagcaaggctaactgaattggtcccctcaaagacagatggcaattccagacattactaaatttttttttccaaaatttaaaatgtacatattaatgatgtggaactactcttagattagccatatgcatagccctctgccatagccaaatgagaatatataacctcttgtttaataacaatagggttttgccatcaaagaggattgaatagatagagcattctggcatttaactattgccagaaattgtacctcagctttaattacactgaaacaaaactcactggcacatatcttccacatgcacctagtccacgttaattacctccacttagcaagtccacctgtctgagtgttagggccacattttcaatacaagttcttctagctgttacactgctaacccatggttctcaaacccaaagatccttgggaaggctaatgcatctcttttagagccctggagtttgatttgtagccagctgttttgaaaattccaacccataaacatttctgccacactttatagagggattctaaacacaaatgaccactgggatgaggcaattacaagacctgtgataaatagcaagcacatcccctgcccaatgacattgagtattttttttcttttgagacagtctcatcctgtcacctaggctagagtgtaggctgaatcccatcccagagtctcagatttagtaaaatctaaagtagaaactgctagcaagttcccaaacaatgctaaggtttctggtctggagccaccacattttgagaaccaccactacaatccttattaaatgttatatgtttctgttgggatatgaggtgaaatggacttcaaactgtttaaaaactttacttcctgacaagagctcactgcagccttaaattcccaggcttgagcagtcctcctgcctcagcctcccaagtaactgggactacaggcgcgtggcaccatgcctagctaattaaaaaaaaattttttgtagagatagtggctcgctacatagcccaggctagtcttgaactcctgggctcaagcaattctccggcttcggcctcccaaagtactgagattacactgaagatggttttacctcctagtagaaataagcaggtcagtctgccaagctccagcacagaactcccggggcctatgtgcttgggtacatacacagcagcttctgcagaaaacaggtctctcatctgtggcttagcactgtgtggaggagggcagagcttccacacaggtgggaacacatccggcttggcaattgttgtaactgaatattagcctcatgccttcttctctttatagcagttggatccatcttcaatcagcatcacagaacacaaactctccagctctttttaggaagtaaagtttttaaacagtttgaagtccaattcatctcatatcttaacggaaacatacaacatttaataaggattgtagtggtgattctcaaaatgtggtggctccagaccagaaaccttagcattgtttgggaacttgctagaagtttctactttaaatttactaaatcagggactctgggatgggactcagcaatctgctgtcacaagtcctctgggtgagtctgatattcactgaaacttgagaaccactaatcccaggcaacgtttccgaactttttgtgtgcctaaggattgcatggtgagctcgtctggggtgttactgaacatcttaatttctaacacttataaaagcacacaagctaatgtgtgccttctacaccaaaatatttgtaaaaaaatttgaaaaatatatgaccttattttacagaaccatttactgcttagaatcaaagcttatcaaaattatttgaaaaattagaaaagaaatatgttttcttagtgacaccatttttttaattctctgtggtcttccttgtgattagatgagtaatttataattatccaatgcatttaatatacttcagaaaggcaaaaaaggtaagttttcttgttggaaaaaaatgactggtacaattaactactatatgtgtttatgtgtgtgcatacactatatatgtatatgtatattggacatatatgtatatatttgatcttttcatgttactgctcgatattaaactatttcttcttttgtaggaattctatgaagttgaacaatttgcattttcttaaatgtcttattttacatgttttcataggcaaacagctttttaaatgcactttagtaattcactgatatacacgattgaatttaggttatttaacattccatgggtgttttgtaattcataaagtgagagtagtgtgttatttaacacaatgccacgtatggccatggataaactggttgttgccataaatcctgaaagaaatttctgggagaaaaacaatttatattacaatcctctttgttttccaaacacaagaataattcaattttaaaacaccactcaagatgcccaaccatttcaaagtaatttactttctatttttttcccttgactttcaaactcattttttatacaaattgtaaagcatggattttaaatagggaaaatattgctgatagacatttgttttgctcaggagttaaactactgctgatttcactgcattgaaaatgttgaaggaaatatgactgaatattttcaggagacagattttgttttgatttttgttatatcatacgatcctatttcaggtctataattttgaccacgcaactaaaatttacagcttcaaagaatcttcactttagcaaattgaaatggcttcagagtaaattcacttaaaataactctcagtttgtatagagatatctatatatccatatataatgtgtattttaaggtatatttccattcctttaaatgaattcaaaactgatttttaatgaaaatgattcaaaagtaacatttattgacaaaaacttctttgatacgcattttatttttaaaaaatcttttcacctaggcataacatttaaaaatatttcaaaaagattcagatggcaccatgagaaaaaataaaatttgttatccttttgtttactccattcttatgctgctatggaaaaatatccgagactgagtaatttataaaggaaaaaggtttaattgactcacaagggaggcctcaggaaacttacaattatggcagaatgggaagcaaacatgtccttcttcacatggcagcaggaaggaggctaatgagtgcccagtgaagggggaagcctgttataaagccatcagatctcatgagaacttgtgcactatcatgagaacaggatgggggaaaatgctcccatgattcagttatctccacctggtccctttcatgacatgggattatgggaactacaagatgagatttgcatagggacatagccaaaccatataattcttcccctggttcctctcaaatttcatgtcctcacaattcaaaacacaatcatgcccttccaacagtctcccaaagtcttaactcattttaacattaactcaaaagttcaagtccaaagtctcatctgaggtaaggcaagtcccttccacctctgagcttgcaaaatcaaaagcaagttggttacttcctagatacaatgtgggtacaggcattgggtaaatacacctgttccaaatgggagaaagtggccaaaacaaaggagctacagtctccatgcaagtctgaaatccaacagggcagtcattaaaccttaaggttccagaatgatctcctttgactccatgtctcacgtgcaggtcttgctgatgcaagaggtgggcttccatggccttgggcagctctactgctgtggctttgcagggcacagcctcctcctggctgctttcatgggctggcattgagtgccagtggctcttccaggtgcacagtgcatgctgtcatggggtctggaggatggtggccctcttctcatggttccactaggcagtgccccactggagactctgtttgcagggttccaactccacatttcccttctatactgccctagcagaagttctccatagggctctgcctttgcaggaaacttctacctgaacatccaggtgtctccatatatcttctgaaatacaggcagagctttccaaacctcaattcttgacttctatgcacccactggctcaacaacacatggaagctgccaaggcttggggcttgcatattctgatgccatggcccaagctgtaccgtagccccttttgaccatggctggagtgtctgggaaacagggcaccaagtccctaggctgcacacagcaggaggggctctgggttgggcccttgaaaccatattttcctcctaggcctccaagcctgtgatggtaggatctgctgtgaagtctctgacatgctctggagacacttttcccattgtgttgatgattaacattcagctccttgttacttaggcaaatttccatggctggcttgaatttctccccagaaaatgggttgttaatttctgttgcattggcaggctgcaacttttccaaacttttatgctctgctgttcttgaatgctttgcagcttagaaatttcttctgccagataccctaaaatcatctctctcaagttcaaaactccacagatctctagggcagggacaaaatgccaccagtctctttgcataacgagagtgacctttactccagttcccaataagttctccatctccatctgagatcacctcagcttggacttcattggtccctatcactgtcagcattttggtcaaagccattcaacaagtctctaggaagttccaaactttcccatattttcctgtcttccgagccctccaaactgttccaatctctgcctcttacccagttctaacgttacttccacattttcagtatcattataatagctgcaccttatttatgataccaatttactgtattagtccattctcatgcttctataaagatctgcccgggactgggtaatttacaaaggaaagagatttaattgactcacagttctgcaggactggggaggctttgggaaacttacaatcatggcagaaggggaagcaaatacatccttcttcacatggtggcaggaaggaaaaaaatgaatgcccagtgaagggggaagccctttataaaaccatcagatctcatgagagctaactcactatcacgagaacagggtggggaaaccacccccatgattcaattatctccacctggctcctcacatgacacatggggattcaaactaagatttgggtgaggacgcagccaaacgatatcactctgtttattaaattgttcatctacaattttgaaggagcactctctatttgtccttatttttaaactttataaaatttttatttgaggctttagagggggtattatacttttatattatgaattttttgttctaccaagaatattttatgttgacatttttaattgaaatatatggctctattttcttgtcttagaaagtaagatatactgaacatatttgaatcacattctggtgactaacagatttttacaattgttcaggataatacttgcatgtattagtatgaaaaaattctacagttgtacacaatgtcagtgattgtactggctgtgtctttcccctagaagatgccggggtgtggtgggggaggggaagaagaaaaagaaaacttaatttttatggtaagaaatcgattattattctatcctcattttaaatcatcaagtaataataagtattaaacaataataagtatttactcaattcttactatgaaccagatatttggaacatgggaatgaagcataaatcatgttctttaaactaaaagaacttggagaaatggttgcaacagcatgtgataatgcaaattatttttggcttttatattattttataaatggccaatgagccaggacaacagtgaatttcataggagttcataaaatggaaacacgaactaaaatagtttaccaacactttgggagaaaatggaaattgagttagaatttgaagaggatcttagaagataggtgatttgggaggaagtgaaaagaagggatttaagctggttctgggaaaagaaaacagcttgagtaaagatggaaatcaatgttatttttatttagtagaagataacaaatttaccttgactgaagcagaggacatgtggagcaatcacaggaaaaaaaataactttagagtttaggccacattgtagagctgaaaggcaaaagaacttggacatttacttaaccatattacaagtcctataaaaacgttttacttagtaggagaaattatacaaatgaatcaacctattcaataatacatgaaaatgaaatgactttgtttttaattgacacagaagttttctattaaggtgatgaagtgtttgcacgtgtatgtgtgcatgttcaagtatgtttgtgtgcatgtgcgtgctggagtcatcatttatcacaataaaaggttgcagctacccacctaattaggcatgaagcaagcaaagactggataaggtgatctttgtctcactttgctcctgagacatctttgtctccagtactaatcagcagtgacgcgtcaagtcatcgtgagtgacaattacagtcctctcattacaggaaatgattgcacgactaggcagattgatgagtgtattggtgttccctaagaaactgagctcctccccaccagccctcttcttgacaacattgctgaatattattaaatacatatttaaggcaattcaggtaaagcttcttcacttggcaaaacaggttatgattgcttagaaatttattctaagagcaaaatttaacacatctccctgaattgtatcttcattctgagagtctgtgcttttctgcagtgccttttcaccttcagtttgtgcaacagtacctgtgatggtgtggattaggtgttacattttgtttagacatggaaaataaaataggtagacaaagtattttgttgaagactggttagttggaagctgagtgtcagactcatttcatttcataccttgcacttccagttgcagatacctttaaataaaacatagttcacttcttcccactacaggccaatggattggctctagcccagtggtcctcaaacttgagtgagcataggaatcacctgccctatacgcaaggtttctcgttcattagttctccagtgggccccagttacttaacatttctagaaggctcccagggggtgcagatgttgatgctgaagctgggggtctggagaccaagaaccactgaagcctgtctaaaggggtaacttcttattggtcacatttcattgcccaactgttcaattccttgatgttccccagaagctttcttgcattccaatcctatatgattttgagttctttctggacacagtctgctctgttatctgaacaaacattttatctgatgctttcctttgatttttccaatcatagtctcatggtctatcaccatgagacagggattgctttaactagagaaatgataccaatactgtttgcttagattgattttctgatttactagtattcaggcattaatatgatctggtgcctgcattctcagtaacaccaatatttgtagaaccattctaagtgtaactttgatcaaactaatcagcttggtatttttttcatggatggtccagctgtcaaaatacagatgtgttcattaacctaacgaaactgtcccagtatgaactatgctgattactttgactaaagtcatcatcagattggttcttgggatccttctagtccaaactgctcacgcagggcctaaaataaaatgactaaaaatctggctatctggctatcgcaagtagaacaattggaggctaaaaagtaaaatattattcttatttaaaccatgaacatcattaacatatttattcaaaagttcttgtccaacatctgcaatgtgccaaacacattcttccaggtgcaggaaacacagcagtgaactacaaaatgaagtctgaatttgtagaactcatattctcaggaaggagaaatgataaacagggaaacataaataaacctgctaccttctgaaaggttagatgctatgatgaaaaaaaaaagcaggaaaatatgatacaatgactgggtgtggaagctgatttaggtagaatgatctctgcaggtctccgtgaaaaaggcattcaggttgagacttgaatgaggagaagtagtcattcatctgtatctcagagtaggaaaggtaatggtaagacttggagtgatggtggaggaaaagcttttaagaagaagaaatagaaagttgcaaatgccttcagccagaaaaatctgggaccttgttggctgtggaatcatggtttgattttcttctaagtacatggagaatcagaggtgacataacttgttttctgcttaaaaaaaaaacaacactctgactaatgcatgtagagtgcattgtaggagagtaagactagaccagttacaaggctattttatcaggtctgttttagacattgaccttgaacttgcagctgaaactttttaaactaaaatgtctctaagtatttccactagcagatcctaaattgaataccaggaatttggctcctgcttttagataaaacactgtaaaaggcattctgtccgagaaaggaattgccatctgctgagaagtgacaatgaactgggatggtaccagtacatgtagtgagaagtagtgagattcaggacctattctggaattgtatttgaaaaggctgtctgaaaaaaaataggttcactgggtatagtgggtgctattggtgacctgtccagacccactttgctggctggagagtcatcctgtagttgttgggagtgctggctggcaaaagcttacagctgcctctgtcaatcactcgtttccatctgaacaacatttttgccattcccccctcctcccatccatcttctttcatcccctttctccataaggcaatgtttctggaagtgtggtcctggaaagagtatcatcaatatcacttagtaacatgttaatactataactgacaaccggaacaaatatgagatatatcaaacagaaaaatacaaagattaaagtttgaggatattccagaaatgacaatttttgcgcatatatatatatatacatatatatcaatgaaactattttaatgaccataaaaagtattgcattgtaaagaaaatttagttttatacaatcaaattatcaaaacttatcattgaatgtgtacagtaactgttaatgccttaaataccattgcttcctttcaaacataatttcttgtttttcctttagtcatgagtttagtaagggaaagtaaatctcacatgattatttttagaaacatatatacatagtaggagagcagagacagagctttactataaggtattgttcacttgattatggaggctgagaagtcccatgacacactgtcttcaagttggagacctggaaagctattcatttagtctgaaggcctgagaatcaggaacattgaggtaggagattgatgtaccaacttgtcagtcaggtagaaagaatcttcaaccttcttacttctttttgttctattaaggcccttaatggattagatgatgctagcccaattggggagggtcatctgctcactctctccaattcaaatgctaagctcttctggaaacaccctcatagacaccctgaaataatgtttaaccaagtttgtgtgcatcacatggcctagttgagctgacacataaaattaaccatcactcttacttaatcagaaattctggagatgatggggtccaggactttgtgttctaacaagccctccaggtgattttgatgcatgctcaagttgagaaccattgaaatagagtggtccctaataagttatttgaacaaaaatctcctttcatgctttcctaacagggacctgcaacctaggatccaggaatgaaggaaaaaaataattgagggtaattcctaggtttttgtctttagcatctggcttagtttcactagctgagatgagaaaaacttgaagagaagcaagttcggagaaatcgatcattctattttgaacttggttactaatttaggtgctttttagatttcccagtgggaatgtcaagtagctaatcagatgaagtctggtattcatgtgtaaggtcaggatttgagttataaatgttacagcctttactgtatggatagtaagatttaggaagaggtcctagagaaagaaaagtgtatagcaagaacttctatctttttttgcatatatttgaaacaaattattagttaaatgtattaaaaatacaactagactgtgtttatgcaaaggattaacaagattttgctaattactaaagaattcaaggatgatttagctttaagggtatatgaataatttttttacctttgttacctgctaagtagagaagccttcttccagaagatgacatctatacctacctatatttggatgctagagaagcagaacctggtgaaagctcaaggcaggtctgatccttgcatcaagcagagaaatacaaagattgaagtttaaagataccctagaaatgaccatttttgcacaaaattattttaatataaaaagtactgcattgtaaagaaaaacataattttacacaaattattaaaactcataattaaatgtgtgcaataactcttaatgccttaaaccccgttgtttcctttcaaacataattttgtatttttcctttacaagtgaaagtaaatctcacatcattatttttaaaaacatatattgtattcagcatcttttcatcactcactgcctattaaaaccccactaacaattaaacacatgctggtcataattgtgtcaactgcttatgatgccaaatttaacccagttgtcaggagcagattgctagaacacatattaaatattttcctattatttgaggactagcaccagaaaagaacaggaaatatgtagggaagaggggacccactgtgggctgactcatttttcagggggtgagtttttatatacaactttaatcctccttagaaaattattagcatgatatagtatgatgctgataaacatcgcttttttgaagtcagacgtaatgacttaggtctactatctaccaattttatgaccctaggcaagagaattgatctctctttgcccaattttcttgtcaataatgtgaacaccccatagggtcattgtgagaattaatccacataacagagacaaaatacatagaatattgcttggaatataggactggtcagataacatcctcacctccatatctactgtgcccaatctcctctgggcttcaggaatgcctagttaggcaaatgcatcattagatgaaccagtgtctgttaagaaggatgattgattgatagataggtagatacatagataggcagacagacagacagacagacagatagatagatatagatgtgagctgggccctgggtaagcactctttaagagggttaacctccatttaggaaaatcatctttaccttggtctcattaatacatgatcctcttgtatgttttccacacacatagtaattggccttgtaactccagtattaccatgtgttaaattccaaaggagtttgcaaccatttcctcagtgactcatcattgtatacattattttattcatttatctaatatatgttgaggtcataccatatgctggaaatcatgctggattatgtagatcagtattatctgtgagttacaaaaaaagaagtgacacaaatacatatgaactagtacaaagataaagagatctatgtagagttaaaactaaaagtcattctctaaagactgactatattgcttcttttattcatgaccagtcttgtgaacttagagaaaggtagggcttcctctttgatgtttgtcacccagtgatgtcaatgagtgaagatctgattttgaccatcaaaagtctctggacaagaagttctgaatgaatggctctggatttgtgctttatagtcagtatagtccatgaaacaactatgggaaatattctttggtaaaggaaggagaagaatttgccattaaagataggcagttttctgcctaacacaatgcaaagacctgtccaagaggtattcatctgtgctaacatctgacctccgtcttgacaagatgtcagtgaaaaatgaactcactgagatgcatttcagatcccttgggaaaagacagacagagagaggacaaaacataaggtttaaaagcagcccttaggagagatctgagaacaatttccaagaatattttcccatgtgttaccaggaaaaggcaatacatcttaaagaagactgagctgcccaatcagcttacttcacttcagtgaactcctccctgagacccctgtagctactctcaaagctttatattgacacaatttaaaatgtgaaagatagtaaaagttaatgtaattatcccactggatgatctcagcaattctcgatcaaagagaaaaagccatcataatgcaatgcctagcaatggctcaaaagcacagccatggcccccctgagaggataataatgatcccaatagcaatacaaccagatctcttaggaaaaagaccatgaaaacctctaaacaattagaggctgcaaacctggcaccagcatcaggtaaggcacagcctcctgaaaacagtgggaggcctcagggatcatgcccaagttcaaggtaccatgtaaaagattgctcctccatcatagggcatagaatagagccatgaacattaactctttaatagaagttttagaagaaaaacttcaggcaaattaaatttaacagcatttatttgagtaaagatcaagtcatggatcagggcacactcagaaactgaacaaggtttagaaagctctgcttcagcagcctgagaagtcaagtacagacattacttgattggctactgctaggtatttaccttatttgtgtgtgatctgggggaaagtccctccttagaggttagtttgttgtttctgattgattatacttaagtttccttttactgtgtacatggagcttcagtgtgcttatgtaaggatccaaggcactggagttgcctcagtctaatgttcttccagttttttgtttaatagaagcaatggtaaatggcatagttaacatctatttcagttttcctttacaaggatttcattgatttccagcagttaatacattcctctacactatgaactcctctcacaggaagcatggaccaaagaaaagtaccgttaaatttctccttatgggctacagtactatgaaagggaaagagtttaatgaagaagttctgagcctcaaggaattcagcttcagccaggcatggtggcacatgcctgtaatccctgcactttgggaagctgacgcaggcagatttcatgagctcaggagttccagacgagcccgggcaacatggcgaatgctttctccacaaaaatacagaaattagccaggcacggtggtgccaaaatgtattgtcagctactggggagtctgaggtaggaggattgcttgagccagaaggctgaggctgcagtgagctgaaattgagtcactacactacagcctgggcaaaagattgagaccctgtctcaaagagaaaaaaaaaattcagatttaactgcttcctcctcctcttctatctcccccttctgccactccaaacacacacacacacacacacacacacacacacacacacacacacttggggatacttgtcttggtgtctctcgcagagattgggagctttcagaaatggtgtgtcaggtctgaccctattctttttaaactaagaaaaaggagaatgttgatgactgagcttcaactggaaaaagtagtggtggagaaagacttccaacaggagttcaataaccatggagattatgtgatggatattcaccagaaatctgtgcaagaagtggatggttcaggcagggggcgagcacatggagctggggctgtcagtgcaaatatagggaatatttcatggattcagactcactgtgcagtaagaagtcagcctgcctgacttcaatatgtaagtgttatgttgtggagtcctgaccttacaggtagaatgaatccatttttaaatggaacgctttctactgagatgggctttcaatttggagcccgttgttattctcttttcgtctattccttatgtaaaatcccttcctgtaacatacacctagaaacatgttttatattctcaatttagacttggtttgaaagttttgctacttagccattttcttcttgtattaatctctgtgtttcacacttatatttgaatttacatacccagaagttaaggtcaaaatgttggacaatctgtaaagcataagcactgacccattagaatcagcatcagccattgtgttggagtagaatctggaaaccaccttgacccattggttgctggattttcaggtggctcatggagggatgagtgtgcttgaacatcacaacactcaagggctcagaacggtagctatctgatcatcagaacaaatatatttcattattttagcaaacagcataataatgatgcattaagttactcagttggaaatcataaagccatcaaactttgcatctgctagccaaacgacggttctatgagtatataaagatcgtaccatcacttcgtctctgtaaccacgttccctccctccaagacacatactcccaattgggtcaattcttcaattgagactaaaaatacaaaaagaaaaagcttgatacatcctctgactattagtttcctggttagaccattggatcaaggtttattactccaactacaaaacagttccttccactggctagtgtgaagcaatctgaaagagacgtaccctagttgaatggtataacttaaggatttattagccttgtaactttgagtaggtcacttaccatttctctcatctgtaaaatatgagtaggatatagtaatctctggtttctccagttttggtattttgaatctagttgtatgaattgacatcagtttgtgcctattgattatttaagtctgataaattacctggacatagtaaaaccaggaaggtagcttttattctgtacttcagaggaaaaacaggaaaaggttcattgatttgacttttctaatttttttttttttttttttttgagaaagattctcactctgttgcccaggctggagtgcagtggtgcaatctcagctcactgcaacctccgcctcccaggttcgatagattctcctgccccagcctccggagtgctgagataacaggcatctgccaccatgcccagctattttatatatatatttggtaaagatggggttttgccatgttggccaggctagtctcaaacttctgaccccaggtgatttgcccacctcggcctcccaaagtgttgggattacaggcgtgtgctaccatgcccggccgacttttctaatgtttttgatttttacttctcatcaccaaattaatttatgtcagtaagtagttacttttgggacaaaggacacacattttggtggtttaaaataatgcattttggaatcatatcaaactttcgtatttttttcccatagaattatttggatttttatttacttatatttacttaatgtaagtaattggagtaatggctttggagtttcgcatgtttatttacagttgtcttcatatattttatccattaaaatttatcctgtcttattgattgtagtcaggctctgactttactaatattttttcacataactatccagttgacccaacaacatttatggaattatccatctttctctaatggtttaagataagacatatttttccatttatgttaagtgatttttagacttttaattcagttccatttatccatgtattcgtgttcaaataccttgtttggcaacttagtgtaatctcagcacattcagcaacttctttatgattcagttttcttatttttaaaaaggcagcattgacagtgtgtacctcagatgttgcaaacatgaaataaaataatgcccatctaaactctcagaaaatcttagatattactgagcctgaaacactattattgtattttcttcttcctgctgctgaattccttttatattttgcaatcagtttcaacctactctgtgtgtgtgtgtgtgtgttcgttctaggaggtatgtaaacagattcactaagttgaaaatcatatagttgggaaaaggctttctcaggtttttctaattcccagaattagtactgtccagcaggaacctttattctacatagtatcctttctactggactgctgtttccatctgccctaggtcatgcctacctcagttaattatgtgttgtttccccttgaaaatcagcaggaatgcctttcctgcttaaaacaaagactgattccctgccagtctctttcacaaaccttgccaacagtggatggaattgatcagttttgtttctccttctctaactctacagggaaaactttactcataatcatggatgggaatagtgcccctagctgagcagctgagattaaatccagcaactgttaacctggtatagggcaagaagagagtattggaaacaacaaaacacaaaaattcacaggcaatatagcatcttttgtacctatttccaaaacagaatctcagctttgttttaataaagcatcattggcaacagaatatgccccgagcaccaaagttcataaaaagtagcctttataacatgattatttattagaatgcttcttcattttttagcacagaaaatctagcatacaatttcataacagacaaaggagccaaagggacatagatttcttatgtactagctagtgaaatgaacttttgatttcagtgttcacatttaggaggcttagcagagagagtacatgggcttttccactttactggattttggaggtaaaaaagaaaaacatccaagcccagaaataatgtcttataagccacgacaaaaatgccccaggtcatgagagaaaactattgcttctgggtaaaataaaattggaagcaaagagaactagaggttacagcaccttgatagttggtggggttcgtatgattttgagtcttcaaatcagttttggatggtcaagaagtatttttttaccatcccgaggctgttaagctacagatttatttctgcatttctacttataccctatgaaagtagctctaacatcatgtgcccaagggcagagcttaaaggaatattttctgtggaagtggaataatcagtcaaaatttggaatcactcccagttcttcggaagtaaagttaattaatctggaagcacatcgtttgtgtataagaaattcaagagcagcataatgagttcagcaattagctttaacttttcggaaacatttctcagaaatatatgcattgaagtctctcccccaactgtatttttaactggtgtattacagctgatttttaaacatgccatcccattggttgatcttgtcatagagggaaaaatccattattagctctgcttgtacagtaaagttctgctttattatgtaatctcatttctgatttactatttgctctaagtgaacgtatgactacaatgtgtaatgaacattgtgtagcatcttgaaaagacaaagattaatgcctccttgacagtttttttccccacttattccttggggaacacctattctacttgtcctgtaactggaattacacattcaccccccagtaatttttataatgatttcaccaaagaacttgaataaaagtagttcaataaatgacactgtaatacatatactttggagtcctattgtgtttttctaagaaaatgtaaaatcatatttagggtcagattttattttatgtgttattgaatgcattgtaaatctagagggctgtttaaccaggttccgtcaggtaaattaattaccaccacaactgggtttaatttgtctttttatcttttctgtattaataaagtcagtgttttacagcttcgatattacctttttgaaagttcttatgtttctattaatgaacaattaaacggtatttgtattcttcaaaattgctaaaaagtcagtaagtagataattataattaataacacattcatagtctaccagtatcttacgatgtatacttgtctttttcttcaaagtgaggtgacctcaccaaaatattcttcacagtaggttgagaatagaatttgaaacttacaatatttttagctcttttaagattatgttgctctattttatcctatttttgtatctcattcatggatcattcttggtgtttattcaattttagtcaaatttattaaatatgatacacattttcttaaaagtgtttaagacttactccagaaaatagtttgtcataaagcgaaagagtttttcagacaatagaattcccaaacagcctacttaattctgtttgtgaatgacttgaggcatcacatgaaaactgcaataaaccacagtctccatcactcccttttctttcatactgagtttgtaatctctggcctccagaaaaatatttggttaaaaatctagtcaaaaagtttgtatgttgtttccctttgggttattccatttatcatttcctgaaaaccaaaattcccttagccctcctagtctgctcttcttttccaaacaaatagcaaattgagtttaagaaggagcctgaaatgaacaatgtcaagtctaattctgaagctcagctaaagctaaatagacatgctagaagagtagcatccatctgaaatataattattgagcaccttttccatgctagaccttattctagctgctggatattgaaagaaatgtaaatttcaaaattatggacaaggatatgggaattgctgtttaaacaacctttactgcaattatgatcttaccagtgggttttgaccagacaccagataatcatcttataagttgagacaggtgatacttcactaacttactgtggatagaacattgaatatagctttatatacatgaaacatacatataacacaagcacacatccttcagctattcaaaatagattttatttttccaaatttcaatagcaattctagtacaagtataatacaagtttaacttaaaattggcatcctatctaaaaggctgaattataaaaataaattttggtaacatcttcagtttatcttactaggcttaaaggcatatcaagagaagaaataaaaatcaatgtattttatttctaggattggtactattattgacacaaggatattgcatcaatatactctctagctatcatttttattttttgcatattactttttaagggtggcctgtgaaagcaacacgagattcccaaattatagacttaaaggtttactttaaaaagatgagatgattgttatttaactttcatccatctgtttctctttaaaaaactgcatttgcagcaaatcaagagtaacacgattttgaaaactgaaaaacaaaaaacaaaatatctgagcagccaatatactttaggataattttctaatgttctatgaaaataggtaaatcaatacaaggtgaaaatgttttgtttatttctagagatgttgattatgtatcaaacccagtttgtccatgaatgttaaatagacacttaccaagtgtctatttggttaaaatttggttaaaatttattttaaccgaagaattcaggagacatcaggttattatttttatgtagttacagtgcttagatgggcatttgttgaacactggaaacttcttattctccaagccacataaataacaggcatatgaacattcagataatatggatgatagttgccattgttgaaaaatcagcatttattaaattcttactatggaaattatatatttagtatctcatttggtctacccagctgcagtatgaagcaggtactgttagtggttccagctaataagtaagtgattatagaaatgagtagaggttattttggcgatttttctatagttaaaatttctacctcttgacataatccattcattttcccccaaagtttctgccttgctttcctcattttataatataatttagcttgatttttatattaattgttcaattccactcctaagatcaaatgttagggtgggacaacgagacacagtgacagggagtttgaatagagacaaaagcccttggaggggagagtatttaatttgcgaatctcatgttgctttcacaggccacaaagcagatggtcaggttcagaagtttagtgcctggcacagagctgggcacaggataaatcttctgtaagccatttcaaatgaagaagtgaataaccaaatagaagaagtcgtaagaccatcctgtctcaaaatagttggaaagcaggctgaaggaggcaacattagtttctgttcattacatgtttgttacaatacagcgtattgaccaacttttcatactacattaaatttcacaaccattttatgaaacggtacacttttcaggtgtgaaactagcagaaaaaccagatgttctgatttcatcaggaaaaccaaatagatggatttaatccatggtagaggtgaggttgggaggtctccaatgatgctgtcacgatttctctgttctctgtttacctccaggaatctggatgattgacacaggaaacaagtaatttgcacacaatagtaagtggcaggactctgaggtcctggaaacagagtgtctgtctaatgtttcactacttcaggctctcactgttcctaggtcagggaccaagaccacaggtcttgtgagcagatagggtagagataacccaacatgcaaaaatgatgatttttacaactgatgagcaagatgtcgcagacagatgaagcctgcctgcctaacttcggggtaggagtcccagccttcagggttttgtgtaaatgaggagaggcaggagtcatagttgatattcaaagcactaccagcaaagaattttggtctcaattcccactctacagatcattagccactcagtttttggcaaatagcttttcttgacttcagtttactggtttcttcaactgtaaagtaggaatgttgaacattaggctatatggcagaatgaattttaatagatgtcataagtatagatgaggctattttatctgcttgatgtctgtaatgccacatcccagaccactggaaagcacagttaacactgcaaatatacaagcagttttgacttcttttgattctattttgcatcatgaaggcaaagtataacctctcatttattcaaggcccatttatttttttttattcagtgattgggtaaatgcagatagtttctaaaatgcctttctaattattggaggaattatttgaaggtttggctgggtatttctgtgagacgagatggggaagatggagatagaggaattaatatttctcaggtttatgaaaaattctaaatgaagagtaaacctaccttaaagtaaacctaccaggagtaaacctaccatgaagattgtgtggacttccctctctccatgttttcctcttagataaaaaaatattttgaaagtaagtatcaaatcatttaataattaaccaggcatccttcatctaaaatagttgatttacttgctagactcacatgcaccctagacatgccacaggtaactattcttttctgtttttaactgactgtgagcttgagaaaatagaatcgccttgtaagcacttgcttgtacagaagttgtttattagttatccatcacagaaagcccgccagcagggtttggggctatatgtaattccagaaaagaaatctttggtgtcttcatatccaaaggtgtttccactgacccattaacgttgggcatgccttcagagaggcctcccaaggactgactgtgtctgtgtttgtcagagaagagataattggcccccacaggaatgagagccatgacctgagcttcctaagtgaaactgtcagaaaagcttccagggtcagacctgcagtctaagcagcctctacactctgttgctgacagtggaatcaagagttatgttgcataaagtccttgaaaccaggtgaaccacaagttctgggtgtcttcggcttcttgtaacactatagggagctcttgtgtgaatagcctaaccatcctcatctgttctcagttctcctgtctcccaggttctagtgctttccagcctcccgatcagtccccactatttccagtttctatttactttttctccttatcccaagttttcatttctacttagagcatcttcaacaaagtatggcacttccaataatttgatctgaatgcggagtaagacttagggtaaaagagtagattgttttgacattacttattttctccctgtattttctatattcacagatgtaatagtaaacaaaacgtcttaggtttccgtatagctttataaggttttaaaatgctgttttaattaataacataatgccgtattttgtcgataaggacatgaccgtgatgtggtacaaagactacacacatactttggaaacaatagttgcaagttcacttctagctttaccaagtatttgataccagagagaaaggcaaaatgctcatgatccactctagcttcagttttcttatttgtaaaatagaaataatcacttgtaccttgcacagttaaagttaataagcctgagcaatgtgatattgttagaggggcatctacataatctgcccaaatggtcataaggatggtgacaggtgacttaaaacattagcgtataaattcttttttttttttttttttttgagatggagttttgctcttgttgcccagactggagtacaatggtgcgatttcggctcactgcaacctctgcttcctgggttcatgcagttctcctgcctcagcttcctaagtagctgggattacaggcacgtgccaccatgctcggctgattttttatttttagtagagacggggttttgccatgttggccaggttggttttgaaaccctgacctcaggtgatccacctgcctcggcctcccaaagtgctgggattacaggcgtgagccaccgcgccccgccattagagtctaaattcttatggtggcttgtttaataatgaataaaggtgattatgattcaattcaaataacacaactccttgtttaaataatttaagtcaatgtctgttagaaatacagttgcatgccttgaataagtaagttaatttaaatacgtgtgtgtatgtatatgtgaatatagatagataatttcattattctatttatgaagatgtctttttaagatgtttatggaacttaagatgatagaattactcttcatagctaattaagagagcaaggccgggcgcggtggctcacgcctgtaatctcagcactttgggaggccgaggcgggcgtttcacgaggtcaggagatcaagaccatcctggctaacacggtgaaacaccgtctctactaaaaaatacaaaaaaatagccgggcgtggtggcgggcacctgtagttccagctactccggaagctgaggctggaggatggcgtgaacccgggaggcggagcttgcagtgagccgggattgcgccactgcactccagcctgggcgacagagcaagactccatctcaaaaaaaaaaaaaaaaaagaaaacaaaatggcaatatatattatgaattcactacaacttttaattagaattttgttagtcataatggaatctttatattcttgaaaaatgatctgaaacgtctgttttttgaaaagcatgttaatagctttgttacaatagtcagcatgcatattgatttaacgactcctttgcatgactctaaaacatgctccatgtacgcaccagagttccctccttggcccacaaattagaagtaactgttatacaacaaattaggtatgaattttcaatatgaaattccagtgctccttgacaattctttttctctaggctatgagtgtgggtctcagctttaagctgatgggttaaattctatatgtataagcagatccacattctcttcttttagcttttctgcttcataagtattttgctgtttaactgatccatcaccattacatgtggtttacttttccattttggaaaaaaaatggtaaaaaaataatatcatgtatattccttcttaaatagattcaatactctggtaaaaacaaacactaagtaaatgcctaatggcgtgaatctgagaggagagtgcttttagtaaattcaggctgcagacatgtttgggtaacattttgctatccttgctctaaagatacatgctaatggatgggcaagagtagcattaatgagctcactccattaaattagttctttttttcttgttaaatatccaaaagagaaagatggtccacttaactagggaaaaaaagtttcattttagtgcagtagaaaatatgatgcatattttctttctaatttaatttctaaccattaagattcaattgtacaaatgacccactgaagcacttggagagattagaaaactataaactgaatgtcatttgaatttggctgtctagacaccatgatgttatatagggtaattcgaatttaacatcatatttttatgaggccaccaagataagcccagtgacttctgtgaataatcactaatgaggccctcaaatggaatgtgagaattgatctcttctctggtggttgtttttattaaacaccatattggccaacccttccaatcactgtgatttgaacttttgtttgaatagtcaagttttctcttggaattgtagaaaaaggtcgctgtcagtctgtgggctgaggaaaaaggattacagctctaatgagccaaatctgtgcaaatgagaaaataataatctcctcataattagaactccctttttaaactaactgttggtcgtgagtttttcaaaagaagaaaaatcatttcattatttggttaaaagaatatttggaaattaatgccactggaaagggggaattaaaatgacttcagctcgtttacccaaatatgttcattgctggaacctcatcctgattttctagtcaaaacaattattgttgttttccatgaagtttagatagcgagaatcatgcattgtctgttcatgcagtagttgacatttactgcatacagcaatcactttcagtctttctgaagactgcgctgtaggaaggaaggctagcacgcccattttacagatggagaaatggagtattgctttctcaagcctcaaagaaattcttgaaatggtattagaaatcaggactgtcagctcccatgctcaatttgtagatcattgtaagcagcagcagcagcagtaacagcagtactggtagagtaaatcgagaggagaaagcatttcaacaattccagcagtactcagttaggaggagattttatttggaactcacaacacacagaagcatgtgtctacttggttgtgggtgggtgctcaggactgccctaggatattaagacatattactttagtagaggcatacaattctcccaggctttcctagctccttttttgagcttctcctggcattgaagggtcttctgggtcccccgtgtatctgcaacctgacctttctgaggcttgaaaccaagagagtttagaagccaacctgtaattaaatagccatgtggaaaaccatgctggaaaaggcaaccccatgggggagttcaaactgaaaggaaaaacagtgaaggtataagatgtgagccttcttgtatcccttctgtggaatgtcacatcacagtagaggaggattccagctgaagagtgggtcatttgtgtgcaggcccctggaatggggcagcaatgtttgcttgcttttctggagtttcagggaagccaaagttcaaaagccaaggactttccatgattaaagttccattctcaagaaagcaccactatgcattaatgtcaataagtcaccatgacaaaccagtaaaatagggcaaatataatcttacttttcatatattagtgatgttaaaaaaatggcccattggctcatgcctgccatcccagcactttgggaggccaagatgacaattacttgaacccaggagtttgagaacagcctgggcaacatagaccctgtctctgcaaaaaaaaaattaaaattataatttaaaataatggcccatagtggtaatgtggctgtccctaagatcacaaaactagttgttatgagagcttgacttgctaatcctgttatctgatgctttgttgaggactaatggtggattgatcctgtagaggccaggggaagactttctcttcaccttctgaagtttcactgagaaatcaactgacaaaaagaagattcattgaaaaaaaggcatacatatttatgaacatacacatgcggaggaccacagagggattgcttctattccccagtaggattcagaagctcgtatacaatcttgaggttacagcaagaatgggtgcttggatcatggcaaaataggctatagtggtaaaacacatgaggggaccagggaagaggaggcctggatagcaaaaggtcttgttttgcagatgagatcaaatagatggtgaatgtttctttaagacctttaaaggtatcagatattcagttaatcttttctaaatctggactagagaaagcctggctccatcaatgcaggttttctctacatatgctcttctgccccatgaagacaattttcaaggctacttctgtttgcaggccctctgaacagccatctcaaaacaggccaaagtatattttggggtaaattattttggtttatttcagttcctactttgaaacttcaaaaaattacatacataaaaaggcaaattggtagctttggagaaatttgggttagaggttcttagattagataggcaaaggaaggggaagacaaactaggataagcaaaaagataaataaataaataaataaatacattattccatatcatcttgaatcagttttgtagtccagagagtagatcagctacagctgttttccattctagcaggtgcattgccaatgggctagacgtctatataggatgcagcaaatccatctctaataagaggcatttctatggaaactaagaaaaacaaaggttaatatctggagtggtctgtagatttgtttttctagagtgtctaatgcatcttcagatggcagtggcaatgtttctggattgtagtttaaatcaggtgttcaagtgaactttataagtagttcatacatcagctggcacaaaagctgcttatatataagttgctccggtgatttctcccaacatttatatcaagttgtgtagcttcagtgtgcagagcttcaagaaaagcacagtttttggttttaagtgattctaaggcagaaaaatgggagaaaaatttgaaaacattagtttggacacttgtagccaggaagtaattcaggattcagttcaaattatagacaaataaaaaaacctccaaaacaatgggcagggctagaatctaaaaacatatgtactacagttttcttttgaaacataatttctcctccggttccccttttctaccaaagacaaatcatgtgtagtaagaccatttgtttgcaaaataaattttagtcttagaatactcagccttattatttgcatagagtatagcaagaatagtgattggccatataggttctttaaaagttggctttgctagccgggcgctgtgcttcatgcctgtaatcccagcactctgggaggctgaggcaggcagatcacgaggtcaggagaccgagaccatcctggctaacacggtggaaccccatctctactaaaaatacagaaagtgagccaggtgccaggtgtggtgacatgtgcctgtagtcccagctgctcaggaggccgaggcaggagatatacctagaacctgcgggcggaggttgcagtgagctgggatctcaccactgcactccagcctggatgacaaagcgagaatctgaatccatttcaaaaaaaaaaaaaaaaaaaattttggcttcactgtgactttttcataacaaatctcaggttagacttttaaaagcctctaaagtctataaagccaagctaagtatttggcatcagactgtgcccgtaacacttacatgaattgagtgaatttctgttttctagaggtttcaaaatatcttgaggttcctgggcctgtcagaaagtgacattcttacttgcaaggtcaggaaccttgtacggaaacaatgtagacaaggtaccaggccagcctttccaaggagctttttattggctctataaagtcaacttcaattcctcaaagcagtctggtcgtatctgaaaataagccattacagtcaaagccattaccagtcaaagccttggtaaaataactagtacccacaagtgtgtcctcttacagaagaaactgattcttgtggaacctatgtaaacaacgatattaccataaaataggaatgttcatgaatagtttccaaattttggagaaatcatgtagatagaagggtaaatatttcagttttgcccacaagagtatagagcacccaattgttgtaagctataaagaaataattcttgactctggaaaacaaaatataaaaaagaatcattaatattccaaacaaaaatcatttaaaaaaagcgtttaagtcctatgtcagttcaggaccacgtaattaacttattctgcttgctgttgggttagcaatatttatgattacgtcagcttttaaaatagagccctggaaggttttacatgggtctaatgacaagatctccaaagttatcagaagcctgtattcaagagtatttcagggtacattctgtaaaatttattgaagaagcaaattttggactgtagctgattgtaaatggaattttgagaaaaattaaagcaataattttctgtgaatgataaaagacttagaatagccacgggtaaagatacaactgacaaggaaactttgttgtatcatggcatacgacaatttaacataatcataattgtgactgataacatatcagaattttaggaatctcatacagtattagaacacattaataacatgtttatagaaatataacttgaataaagttaactccatattttgacaatgctttccatatgatttttacataccagataaacctcgtatgttcctcttgggcttccaggagttctttttggaatttccaaaagttaattcaaggtcaaaaagacaattttagattcgaaattaaatatggaagttcgtcaaatatcaaaggtttaaaacacttcatatcaaaataaggaaagttaaaaatacttgatgaaaataggatcaccggtcactgtaaaataatagttaatcatttagctaaagtgataattaaaaaaaaatattccggccgggtgttatggctcacacctgtaatcccaacactttgggaggctgaggcaggtggatcacctgagatcaagagttggagaccagcctgtatgctgaaaccccatctctactaaaaatacaaaaattagccgggcatggtggcacgtgcctgtagttccagctacttgggaggttgaggcaggagaatcacttaaacccaggagagggaggttgcagtgagttgagattgcgccactgcacttcagcctgggcaacagagcaagactgttgtctccaaaaaaatatataactaaaaaaattaaaaaaaattcaaaaatcaaaaacacttactcttttacagagaggagaatcaggtttccaaataatcaaaagatggaataaagaaaatatgagatcaacggaatctttcccttgagttcttccctctcttttatttctttagtttacttaaaagatagatagaaatattttactatgtcttgttaatgctacacaaatatcttgttccaaggagaaacctaaattctacctttccatcagtatattattaatgctaaggctaattttaataaaatttatttcaattagctttgaccagagaagatattcataaacattttataacctcttacaatttttcctattttctttctttccctttttatattcatccagtttcatctattctttatttcttaaatacaatttacaacaacttttaaaaacctttagccagaattactattcccttaatgaaaaccacattctcatgctttcttataacatttcttaccgaaaatacatctcacttttcttatacactttgcatacagaattgtttctcttgtatctagtagttttaatcatacatattaatcagtgttgactcccataaccctaattttcagtgaaaacctaggaaataagtaattttaactgtcagtcatgtactaacaatttataaatacatatcgtataagttttaaaagcataagctttctatagaacaatttttctatatggaacaggacatatttactagcagacctacataacttttgtttttaagaaataagccaaaagcatatgagcttaaactcatatttagtaattaatatcttagcattatatcttatttggaaatgatctagatattcaatgattattcatcatttaatttagcttaaactctaagtgcatagttaccaaaaaattttgagaaacctttttaagtaaatatattataaaacataacttttattaaaagtgtatttatgaatgtttatctcatttacagctatttaatctatttttaacaactatgtttggtaaatttcataagacaaatctagccatcatctcaaattaaattttctattaatcatttttgtattactgtctgttaggcaagtatcataaaagcaaggaccttaaaggaccttaaagttagaaacatacatatttcattgataactcagcagacttactttattaagctaacaatattaaactagtattatttaccagaagactgctaaagtaatgcaaacttaaaaagcatttaggtttatttacttaaattatgagtggtcatttataagtcaatttgctaccaggtagacaatatacaaatagacatgtatatacaaaaatacagacataaagatcttatagctttaatttttaaatttttagccatgagtcaggtaaaactcactagtttaaaagggcagttggattaaaactgtatctctgtaagtggaacaacttaaaatttatttcttccacatgttcaaagcctttactaaatttcagagaaaacagggtagcaaatttacatttgaaagcatagagagattttaagctttttcaagaagtctgggtgtgttagaggaagattaaaaatggatgctaaggtaacataaaatcataagaatttatcacagtattttacaaggaaacacacagatgaacctagagaaagttcagaaaccttcacaaaataatgagctaaatgcaagaaagtcatattttggagaccaatctagtttgataggtggctttttaacatagtttccattttctttttttaatttaattttgtattatactttgagttctgggatatatgtgcaggtttgttacatgggtatacacacgttacataggtatacataggtgccatggtggtttgctgaacccatcaacctatcaacaacaactacattaggtatttctcctaatgctatccttccccagcccccaatccccccaacaggccccagtgtgtgttgttcccctccgtgtgtccatgtgttttcattgttcaacttatgagtgagaacatgtggtgtttggttttctcttcttgtgttagtttgctgagaatgatggtttccagcttcatccatgtccctgcaaaggatatgaactcatcctttttttattttatttttattgagacggagtctcactctgtggcccagcctggagtgcagtggcatgatcttggctcactgccagctctgcctcccaggttcacgccattctcctgcctcagcctcctgagtagctaggactacaggtgcctgccaccacgcctggctaattttttgtatttttagtatagatggggtttcattgtgtttgccaggatggtcttgatctcctgacctcgtgatcctcccgccttggcctcccaaagtgctgggattacaggtgtgagccaccacacccgcctgaactcaccctttcttatggctgtatagtattccatggtatatatgtgccacattttctttatccagtctatcattgatgggcatttgggttggttccaagtctttgctattgtgaatagtgccacaataaacatacctgtgcatgtgtctttatagtagaatgatttataatcctttgggtatatacccagtaataggattgctggatcagatggtatttctggttctagatccttgaggaatcgccacactgtcttccacaatggttgaactaatttacactcccaccaatagtgtaaaagtgttcctacttttccacatcctctccagcatcagttgtttcctgactttttaatgatcgccattctaactggcatgagatggtatctcattgtggttttgattagtatttattagtatttctctaatgaccagtgatgatgagcttttttttttttatgtttgatagccgcctaaatgttttcttttgagaagggtctgttcatacccttcacccactttatgatggggttgtttttttcttgtaaatttgtttaagttccttgtagattctggatattagccctttgtcagacagatagattgcaaaatttttctcccattctgtaggttcagcatgcaaacagagacaacttggcttcctttcttcctattcgaataccctgttcactctgatgagagtttcttttgctgcgcagaaactatttagtttaattagagggaatttgtcaattttggcctttgttgccattgcttttggtggttgtcatgaagtctttgcccattcctatgtcctgaatggtattgcctgggttttcttctagggtttttatggttttaggtcttacatttaaatatttaatccatctttgagttaatttttgtataaggtgtaaggaaggggtccagtttcagttttctgcatatggctagctgattttcccaatgctatttattaaataaggaatcctttccgcactgcttgttttcgttaggtttcttaaagatcagaaggttgtagatgtgtggtgttatttctgaggccagtgttctgttccattgatctatatatctgtttggtatcagtaccatgctgttttggttactgtagccttacaggataatttcaagtcaggtagcatgatgtctccagctttgttccttttgcttaggattgtcttggctaaaggggttcttttttggttccatatgaaatataaagtttttttctaactctttgaagaaagtcaatggttgcttgatggggacagcattgaatctataaattactttgggcagtatggccattttcacaatattgattcttcctatccatgagcatggaatgtttttccgtttgtgtcctctcttatttccttgagcagtggtttgtagtcctccttgaagaggtccttcacatcccttgtaagttgtattactaggtattttactctctttgtagcaattttgaatgagagttcactcatgatttggctctttgtctattatttgtgtataggaatgcttatgattttcgcacattgattttgtatccggagactttgctgaagttgcttatcagcttaaggagattttgggctgagactatggggttttctaaatacacaatcatgtcatctgcaaacagacaatttgcttcctttcttcctatttgaataccctttatttttttctcttgcctgattgccctggccagcacttccaatactatgttgaataagagtcgtgagagaaggcatccttgtcttgtgccagttttcaaagggaatgcttccagcttttgcccattcagtatgatattggctgtgagtctgtcataaatagctcttattattttgagatacattccatcaatacctagtttattgagagtttttagcatgaagggtgtggaattttatcaaaggccttttcagcatctattgagataatcatgtggtttttgtcattggttctgtttatgtgatgaattatttttattgatttgcatatgttgaaccagccttgcatcccagggatgaagctgacttgatcctggtggataagctttttgatgtgctgctggatttggtttgccagtattttattgaggattttcataccgatgttcatcagggatattggcctgaaattttccttttttgttgtgtctctgtcaggttttggtatcaggatgatgctggcctcataaaatgagttagggaagattccctctttttcaattgtttggaatagtttcagaagaaatggtaccagctcctctttttacctctggtagaatttggctgtgaatcctcctggtcttgggtttttttttttgggtggtaggctattaattactgcctcaatttcagaacttgttatttgtttattcagtgatttgactttttcctggtttagtcttgggagggcgtatatgtccaggaatttatccatttcttctagattttctagtttatttgcgtagaggtgtttataatattctctgatggtattttgtatttctgtgggatcagtggtgatatcttgactatcagcttttaattaagctgacttatgaccctatagcgttctaaaagaaattctttcaaatctactgcaatgtggagtagacttcactgtgaatcctgcaggagattctaagtaggctgtctgaatatacaaaggattttaactttgttttaggtcagatttttgctctttaacttggtcaagatagtttctaaggctaaccattacattattatgtgtctttcttttaatttgatcttcccataaatacaaataaggcaattgttttgaatgagattgctaatatgtgtatgtgtgtgtatatatatatatatatatatatatatgtgtgtgtgtgtgtgtgtatatatatgtgtgtatatatatatgtgtatatttgtatatatatgtgtgtgtgtattatatatagttttaatttaggcttctttttaatttaacagattcaccttttggtcactgatgattaggatttttactggtgtacttgttctaatagcagcctaatagccttttcatggaaagcccatgatgtaattttccaggtataaaataagttaaaacgggtttaatggagagggcatagagggaatcctaatgatttttcccccaaaaaattactcccagaagtaggctaagattgccaaagtcttctgttgccacagacagttaagtatggcatttgtatgcgtgtagcatctctgataacctacaaatttgtggagtgctgccactaatgaaaccgctgttgcaaaagtatgacagtaagagaaatttgacatggctgactccatcttgcttctagcacagggtggctgtctttgctcattcctaggcatggaccaagctaatttgggaagaaatttagtttatagttaaataatagtgttatgggatctttggggtgtcattttcatgactgtgaagctctgtggccggtggcacttttgcccaagttttgcttaggcctgctgggctcattctgcccattcagcctggcagacactgctcagctcacactactggcctgaaccccctgcctccaagggagactgtgagtcaggtagggagcaccaaggggtgtgggagtgagcatggggtccagccactgcacacagtcagacacaccagctgctgccatggggcaggaagctccaggtgccagcatgggcaccggtactctgcaaggctgcagctggaccaggtgcaccacaggcagtttccccagctggcactggggaatgtggtgtcacctggaatactggagatggcaggaactgcagtgccccaaagagggagatacagccctggctcttgaagctcccaggtctgggatccccaaagggtcacagctcttctctacttccctttgcctgcaatgtggcaaatgggtcatatttcaactgttagtgttatagctcttttagcctcgccatttgttggttcccaagttctcgtcccgcaaccaggaagaataagttgcgcagacaagtggagggtgagcaagatgaaaaggagttttattgacaatagaaaagctcagaggagacccacagtaggcagctcctctttgtagccagggtgtcctgataactctcagcagagagggtagctcctgtctatagctggtcgtcctgttgtctgctctgctctggttgagcccagggcttttatgatcctcagagtggaggaagtgtgcctgcattggtccatgggtggccataggtgggcctggaaaaggcaccacaagtttccactctggtcacaggactggcagcctggcctccagccttcaggcccttcctggcttgaaggtggggcctcaccgtggacccacccccttctgcccaggagcctgtctgcctcctgccactgtccatggcacccagactgctcatgccgaggggcaccagcaggccagcaccgagctgccctcagccctcccttggcttcctcccatgctcgtcagcacccaaagtctagagggggccaaagtctgctggcgtgtcagcactgccctgagtgtatgtactcctggctgggctgtgacagcccgggcttggccccaaccctgttccaatattgcagtgggtgccaggagctaggagaggccagacggagagaacagacagccccaagcctggggggtaaaggcggccttctcaggcccccaagggtgcagagtgcagagacacctgggtcctgcgacagggagggcagggctacagccccagccatgactcctctcagcctggggtgggggctccaggtcctcactgggcccctttctgtccgctcctccaagcccgaccacactgttcccctgccagtgggcgacttggcctagccccatcacagtagctctcagggcagcaggctctcgggggtggggctcccactggctccggggagtgctgcacgagctgcggcccagatctgcctcctccttgcacactccctgcaggtggtgggcaagagtggtgacgcaggaacagagtccggagtggtggaggctccaggcctggtagcaggtcccgtgggggtgggggctgtgcagtcagctgccttggggacatggggcacaggggacccatcagtgccatttctgctcctgcagctgctcctgccaccaccactcgcaccttcccacagcagctggagcgatggcagccgctgctctggattgcccaccactgccatctacagcccttcccaaaaactaaactgttgctgtgaaacgaatgaaaggccactaagttagaagggtgagaacggctttaattctaaataataccagccattattccggaggccgtaggattcacaacttccccaattactcttgcagataagatcactgttgtagaatctaagattggccttttgagatatcttttcacatttctgcagttttgacaaccagacggtcccaccttgacctgccaatcagtcccgtgccccaccccccacccagcaactgactcagcaaaataggacagcttaggttcactatgatttcatctctgacccaatcatcacgctccctaccctagacccctacccaccaaactatcttggaaaaaatcttaacctctgagccttcagggagattgatttgagtaaaaactttgtctcccatgttgcatagccagcttcatatcacttaggctcgctctttactgcaatgccacggtctcagtgagttgactttgtgcagcaggcaggaagaaacttttgggcagttacagtcacagatctgttaatctatgacataggataggcctcccgggattggacttttccagcactaaccagacaacaaaggttgacatgacaaaagccccatagggatgagacttcttcagatgaacacctgcaagaggtttacacattcaggacaaaaagtgtgctgcttaaaatcttatatatcttgggttctcaaccattttcagactggccagctgacacgacctcaaaatcatgcttcaggcccaatcccaacccctccacggtggaaaccaagagagtgtgctcccacttggtcaccagtcaacctctcagtgacataaaataagatgagaaagaacagtgtcttttttttttttggctgcccacagcaaagtttatagatgctggtatgatcagaactgcaaaactgaacagtctgtaggactggtttgaataacagacttatgggggttttaggctcacattctaccctaggctacccctctttttttcctttagagatggaatctcacttttgttttgcttcccaggctggagcacagtgacatgatcatagttcactgccaccttgaattcctaggctcaagccatcctcctaccttcatagctgggactacaggtgcacaccagtgtgcccagctaatttttaaattttttgtagaaacagggtcttgtcatcttgcccaggctggttttaaactcctgggctcaagcagtcatcctaccttgacctcccaaagtggtgaccctctttgtgacaaaacaacacagaaagacaaagacaagactatttctaggaggaaagggaccaaaaatttatgaatattcatagcagaaggtacacgagttgctacatggaagataatcactcaaattcttttctctcattaatcaagattttgcagagcaaaaagggacaattatttttttccctctgcttgactgaatctctgtctactggtatgtcaagtcctgggttaccttaactgtggctttcagaaaagcacagctttggtatcatgctcatagtgccaaaactgtagggccaagggaaaaacttttcctttgccctctgaagtttcactgaaaaatcaactcatataaggcagattaataaaaggcatacatattcatttacaggaacatgggagaggaccaaagagggattatccccgctccccaattgggttcaggagcttatatgcaatcttgaggttacagaaagaatgggggcttggaatggcaaaacaggttatgggaggggaagaaaaggacacttggctagcaaaggtgggtggtcttattatttagatgaaatctcacaggtagcagccctcagagagaatcgacaatggtgaatgttcctttcagacttttaaaggtgtcagaagctcagttaatcttttctaagtctggacaagggaaagcctcagcgaaagcccagctccatcagtgcaaatcttctctacgaatgccgatctaccccagagacagttttcagggctacttctgtttgctagccctctgaacagccgtctcaaaatatgccaaagtatattttggggtgaaatatttttgtttccttcaatctgatgccaaatcactttataaaaagaacaggagactcatctctgcctttgttattttgcatggtctgtgatagacattactgataaagttgaacgtgtccaggaaatgtgataaagtaagaaccctcaatgcaaagactttggtcatgctggcagctgttcctggggctaagaaaacaatattcatgcactgatctgctggttatatttcattataaataggggttagtggccctaaagagagggctttgatcacttgtaagagctcagtgatgatataacacttgaaaaaatcttcaccacattttattatttctttgccctcctctggtcacttcaagttagaaatacaaattataaaaaataagctattacattttcacagacgaactaatgaaaaaaggcttttagaaaatatttaaattatcccagataaactgtgttaatcctactgacagtctatttgtaatataagaataatgctgtcaatctcacaatttgaaatcggtcacaggctgattttttaaaaataccttacaaaatatcctacaaaatatctttaccttcccacaagtctcatccagagtcactccccgataaactgtaagacaagtctctcagtgtttatggatcaaatttccctccaagtctttcttcttcaacatttgctagatttgtcctgctttctacctcccagtaaacagtgtacagaggtcgggacagaagcatctctttcatccggcaaagagcttatggaacctcagccataggctcaggcattatcccagccttggaaatagagccaatatgtaggaaatacagacatatcagtcagtagatatatacacgagcttgcctatgacatgaaaatggactgttattggctattccatccctcttccattcaacttggattatagctttagcatataaaaccttttggtccttccaaaccatacggacttgagtgggtagataaaccacaagaggtttgatcatttgtcaatagttttatcaaaattaatatatatagtatttatagaacgctgtgattcaccaagggggtaaatagatcagtcaacagtgaatacagctgatttggcttggcttgttcttcctaaactacgttgctgtcttgtgggtatatgacaatcgaagtaacacagaaggtggcataagtagattagtacttgccagatggatgatattgatatgaatgatatgagtatagatgagggaaggaaaggaaagttttccatgagtagaatgtgaatatcggctaatgagtgattgtccctcagttcaaaatcctatgaaagcaagttgtgaagatgaagatttttctatccagagtgttttagaaaggaaggtgtaaggatttgatctaaaattactttccttttgttctcaactctcttacccaggcttcattctactttttctttgtcttcacgatcaaaaatcagtgagtacagaacttgtattttcatcctttgttagataaaaatccacattttgtttgagagatgaagttaaattccttatggctacccctgggattaaaacacttaccctaaacttaaactggctaaaatgttttcaatagatcaaggaggtaaatacactcctgtaaagcagtagtgtatgttaataatatttttaaaaattaaccaaatcttataagccaattacttttaatgacagacaaagaagaattgtctttatggcttaaaaacattataaagaccaatttaacttatttaaaatgattttcgaaatggccatattttctgcaaaataattaagctgtcatacggacttctttataatcaaaattgaccattgccaatgttagttaccataaaggtatttaaatacaaaaataaaattgttttgagttataatcaatttttagtttattattctttattctcaggctttatacttaggaaatgttgaatatcctttgaccaaaagttttcaggtttaatttttcatctagttctccatcttgtctacatcatatctcttttatgggtctctattgctatcacacatgttctttaatttttatcaacaatggtgtgtttttgttttggattttgaaaatatttggtattttgtttaatgaaatggccattgagatacagccacaagaggagacagaggaaaggctcaggaataaaacaaagtttattatatttagaggtcatagagacagaaggcagggcacactacacagggccacaggggaaagaaactagattggttaggaaagagaagacaggagtgaaggggagggttagtctagagcctttactggtgtttctttgggaaaggcaaggcagggaagggtgaacagtgtagaattggctaggtataattttggtggactttgggctgtggggcggttcctgattttttggcatctgactttgggatgactaaggcagaggaatattgccttctggggtgtttgggccagacagaggaagtatggctttagattggttgatttgtacatcaacgcaatgttccaggcgaggtcctttgctctctctggagttgactagctcaaggaacagtaatttctcaccacccagaaaggcttttcaggatgtcaaaacaatataataaacaaagttaaaacacacaacagcgaaacttttttttttttctgaaaaaaggctactggctgttatttcttgccagaatcaataaaaattcctcctaaaagataattaaaaattatcttctctaatgtattgctgcaacctggccatcaaacagcactaaatgtaacttgtcttaatttttaccaaagaaaagttggtagcattacaatctgtctgtcttccttcgagagatagagatgtgaaatgcaaacactgaacataatgttctgtgtgagctctaaaaacaccaagaaatagatgtaggaagttacgtagaatggtggtctcaagtatcatccccaactgttgatacaaactaaacttgcagtcagggatgctatagcataaaatattcatgctgttattggtgctgaaggcgactgctgatttatttgcaattagtagtaaagaattcataacaatgctatgatgctcagccctcataaaccctgggaggcttctgtattttgcaggcttgcagttctgttgtcactgctatacttttttaaaaaagaaatgagctaaaccttgtcagagctgacggcactatcttttggagcttttcttctcccaattgaagataaaggcaaggaagctggcctgccacacagaggctggttcctggaccttctgggatctctcattccggtcagtttgctttatcgggcacctgcccaaggatgaagaaatcataactcataatgacttgtttgaaatattttagaccacgtgggtgagaagaacacactttaaaataaaaggaatgtgtagtcatccttccttacgtttgccttccacatatgtcctgctgatctagtattttgatgttctttagtgaaacaacatttatccagggaaattctaaggatataggaatccatcaacactagatttgtaagccaacaaggaaacaatagagggcaactaaatcaatcatttgtcataaatacaaatgtcactaatccaaagttggtggccacttttctgtttttacatcagagcctagagaatctattgtttactgatctgacactcttggtagctttttccagattccactttggtgctgatctacattccttttctcagtgataaatgccatttagagttgtattattaataggatttaattttgacagccagttttaccaaatttggcctataaaggcatacattcttcatatgcataggcatacattctttacttgatggctacatcattcaactattgtattattaagaaagccttgtatttacattggatgtcacagtttataaagaaaacatagatgtattttctcaagccatagaactgtgctttatagtgacaatttccatattatgggcccataatgtttagggttaattctgcattgtaatggctaacagaaggaatggtctggatcagtgcttctcaaattgaaatgtacttatgaagcccataaatatctttgtaaatgcagattctgactgagtagtctaggatgaggtctgagagtcaaaaacatgaatgtggggagcctacatgcattgtgctcaggagctgccttagagatttttgccttccatatctcccctttaaaattgcctctgacgtttgcttttgggctgctccctaaaataaccacctgccagtttatcatctcttgtcgcagaccctccatttccctagaatagtgttgctagatttaccaaataaaaatagatgacaccagttaaatttgaatttcagataaacaatgaatatgtttttaatataattgtgtctaaaatattgcatggtacacatttatactaaaaatgtattcattgtttacctgaaattcaaatttaactggatgacctgtattttatactgtaatcgtaccctggaaacaaatgccttggtgtgtattggtctaggtcaatctcaacactgttgacttggggtccagatacttgtatgttgtggtagaccatcttgtgcattataggaagtctagcagcatctatggcttccacttaccaaacacctattacaagcccgtcccttgttgtcacaactgaaagtgtctccagacattggcagtgtccctggagaaaaaagaaagcagccccagtttcgaactattggtctagagggaggagggtgtgtgtgtgtgtttctaaatatgtaggttgagaaaacaaaatattagtaaagttttcggcaaggtgcagtgcctcacacttgtaatcctagcactttgggaggctgaggtgggtagatcacttcagcccaggagttcgggaccatcctgggcaacatggtaagactgtctctataaaaaatacaaaaattagccaggcatggtggtgtgcacctttaatcccaggtactttggaggttgaggtgggaggatcacctgagccaggggaggttgaggcttcagtgagccaagatagcaccactgtactatagcctgggtgacagagtgagacaatataaaaaaaaaaattagtaaagttttggtaacgtgtctttctttgtcaaatatgataggagagatgtaatgggagtttctaagttaggttctgtggaagtcatgagattaaaaaaaaattacaagcaaatattttgtcatattttatctacgtatgaatctgcttccctgtcccgtattctcctaaaacatgcaccaagtagcacttaaagctatattaatgataatgtaaagagtatactgtttcctgagtattttgttccatttctatacccatgaaataaacatatttcctgtgtgtctctggggctaaatataaactctcttccccagcattcatgatctttcactggcttcctcctccctccccaaaactcccctccccactttggggtttcctccatatttcctaacgttcctctctcatctgcttcatcaggccatgtaaaccaaactgacacagttcacacttaactgtgaattccaagcaatttctgatcatgtgctttgctagtattgccctccattcacactgcctcatagccatcctcaaatacattctataaaacctaactttcaagaaaccctactttatttccccaacccataagaatcactctcttttctggcactgtccataacacaactcactttctcccttggataagaaacagttactaacaagttatctcccatactaaccttgaaagactttagagtaggttttgggactgcattagtgttacattgtccaaatcaccacctacatgcagtccccaaggtatcctcatatttagcttatgcacatgcgtttaattctgcttagaatgttttaaccccgtagccttttctgacctccccatttaaaattattatgactctgagacaacacacactaaaccacctttcctaatttatttttccccatgaagtcattattttctctcacatgttatttttacttatttgtttattatctgattctccctgagagtatataatttttactaggacgggtcacttgtgtctctttccctagtgactggagtagtttctggcacagagtaggtgttcaataaacaattgttgaaaaagtaattaatgtgctgggatatctgaaggtatttcaaaaggtgttggtctcaaatatatttgatacttgagaatatcagtagaataattttgaagggacaaaacttccatgggtgtagaacttctaaaacacacccgggcacaaagttatcactttataatcctatcttgaggttatttcacacagaaggcttagagagaaaaagctgaaaagttgtattgattgcaattttgggggaagtgtactaaaaagactcccatgcttaaactgctctaataccaggtgcaggaaataccacaattgctgatagaacaaatactatattacttgttactggctgagtagatttagaaatcaaattggacctaaaggaaagtgaaagaaagctctttcataaacctttgcttctttttcctttcctcttttttattgtcttcataaaagtttcatttgagggaataaagtgccccctggggctgtgtctacatgaaaccttaaggtattaagcattcatttttgtgcagttgatcacacaagtcaatcatgccaaattgggaagttattctcccaatatgttaaccaactatacatgaaatttctagcccatatgttgtttggctttttttttttttttttttttttttttttgagatggagtttcactctgccgcccaggctggagtgcagtggcacgatctcggctcactgcaacctccacctcctgggttcaagcgattcttctgcctcagcctcctcagagctggtagagctggtattacaagcatgtgccattatgcccaggtaattgttttacttttagtagagacgggatttcaccatattggccaggatggtctccaactcctgacctcatggtctgctcacctcagcctctcaaagtgctgggactacaggcttgagccaccatgcccagccatgttgtttggtctttgtcaggactactgtcgcagctcaagagcagccatagacaataggtaaacaaatgggcataactgtgtcccaattactctttgttttatgatattgaaattaaatttcatatatgcttcacatgtcaggaaatatttttcattttaaatttttgtgggtacatagtaggtgtatatatttatggggtgcatgaggtgttttgatacaggcatgtggtatgtaataattatgtcatggaaaatgggatattcatcccatcaaagatttttcctttgtgttacaaacaatccagttatatatttttagttatttttaaatgtactatcagattattattgattatagtcactccgttgtgctatcaaatactaggtcttattcattcttttttttttctttctttttgagacagggtttcactctgtcacccaggctggagtgcagtggtgcatttcagcttcagctcactgcaacttctgcctcctgtgttcaagcaattcttgtgtctcagcctctggagtaactggaattatagccattcactaccacacccagctatttgtgtgtgtatgtgtgtatttttagtagagatgtggtttcaccatgttggccaggttggtctggaactcctggcctcaaatgagtttgcctgcctcagcctcccaaagtgttaggattacaggcgttagccaccttgcccggccttattcattctttctaattatgttttgtatcccgtaaccatccccacttccccctgaaacccctactacctttcccagcctctggtaaccatccttctaatctatttcctgaggtcaattgttttgatattttagctcctacaaataatttagaatatgtgaagtttgtatttctgtgtctgagttatttcacttaacataatgacctccacctccatcagtgttgttgaaaatgattaactctcattcttttttatggctgaatagtactccattatgcatatgtaccacattctctttattcattcatctgttcttggacactcaagttgcttccaaatcttggctgttgtgaacagtgctacaacaaacatgagagtgcagacatctctttgttatattgatttcctttttttaggtatatatgcagtagtgggattactggattatatgatagttctatttttagttttttgaggaacccacaaactgttctccataggggttgtctaatttactttcccaccaacactgtagaagggctcccttttctccacatcctctccagcatttttattacctgtcttttggataaaagccattttaactgaggagagatgatatctcattgtagctttgatttgcatttttctgatgatcgatgatgttgagcactttttcatatgcctctttgccattttattatcttctgagaaatgtttattcaaatcttttgaccatttaaaaacattggattagactttttcctataagatgtttaagctccttatatattctggttactagtcccttgtcagatgggtagtttgcaaatattttcttccaatctgtgggtttccttttcatgttgactgttctttgccaagcagaagctttataacttgatgtgacccagtttatctaattttgctttggttgcctatgcttatgggatgttactcaagaaatttttgcacagaccaaggttctagagagttccccaaaagttttactgtagtagtttcatagattgaagtcttacatttaagtctttaatccattttgatttttgtatatggcaagagataagtgtcacatttcattcttctgcctatgaatatccagtttcccaccaccgttcattgttgaaaatgatttactgtaagtatatggatttattgctgggttctgtattctgttccattggtctatgtgtctggatttatgccagtaccatgctgtgttggttactatagctctgtagtataatttgaagtcaggtaatgtgattattttagtttttttctttttgctcaggacagatttggctatttggggtcttctgtggttccatataaattttaggaatttttaatatttctgtgaagaatgccatttgtgctttgatagggattacattgaatctttagattgctttgagtagtgtggaaattttaaaaatactgattcttccaatccatgaacatgaaatatctttctatttttgtatgtcttctttaatttctttcattagtttttaatagttttcattttgagatctttcacttctttggttaacttcaaagtatttaatattatgtgtggctatggtaaatgggattactttttatttctttttcagattgttcagtgtaggtatatagaaatgttaatgatttgtatgttgattttatatcctgcaactttactgaatgtgtttatcagttctaatagttgttttagggatcctttaggtttttacaaatataagattatttcatctagaaacaattttgggttcgacttgccctttcttttttagttctttatagggatcctttaggtttttacaaatataagatcatttcatctggaaacaattttggtttggacttgccttttcttttttagttctttaagatgcattattaggttatttgaagtttttgtttctttttgatgtagacacttataactatgaatttccctcttggtggtgcttttactgtatctcacacgttttggaatgttgtgtttccattactgtttgtttcaacaaatttttcaattttcttcttgattcaggagcatactgtttaatttccatgtgtttgtatagtttccaaaatgcctctggttattgatttctagtttgattacactggggtcagaaaagatgcatgatattagtttcattttttgaaatgttttaaaacttgtgacctaacctatggtctatccttgagaatggttcatgtcctgaggagaagaatttgtattctgcaatcattggatgaaatgtactgtaaatagctattaggcttacttggtctctaacacagactaaatctgatgtttctttgttgattttctgtgtggaggatccgtccaatgctgaaagtggggtgttgtccagctgttatcatattggtgtctatctcttcctttagcgctaacagtatttgctttatatgtctgggtgctcccacattagatgtgtgtatattttcagttgatgtatcctctgctgaattgactccttatcattatataatagacttgtttctctcctgttacagttttggtctttaagtgtattttgtctaatacaagtatagctacttctgctctttttttgtcttcattggcatggggtatttttttctatctttttgttttcagtccatgtgcatctttacaggtgagatgtggttcttgtgggcaacagatcattgggtctcatgttttaatctattaagacattctatggctttggattggagattttagaccacttacattcaatgttatgattgataagtaaggacttattcctgtcactttgttatttgttttctgttttatttttattttattttttatttatttatttatttatttatgtgtgtgtgtgtgtgtgtgtgtgtgtgtgtgtgtgtgtgtgagatctctttctgtcttccttttagtgaaggtgattttctctagtgatatattttctttctttttattttttgtgtttccactgtatatttttcaatttgaggttaccatgaggcttgcaaagactatcttataactcactcttttaaattgatggcaacctaatactgattgcataaacaaacaagcaaaatgctaataaaactctacactttgtctccttgctttttaattttttgttgtttctctgtgacttattgtacttattgtactcttgaaaagttgtggtagttactgcttttgagttgttcattgttaagtctttctacttaagagtagtagtttatagattacaattacagcgttataatatcctgtgtttttctgtgtgctattatcagtgagatttgtaccttcagatcatttcatattgcttattaacatctttttctttcaagttgaagaaattcctttagcatttcttgtaggacatatctggtgttgatgaaatcccctaagttttgtgtatctaggatgggctttatttctccttcttgcttgaaatatattttcactggatatatcattctagggtaaaagttattttccttcagcactttaagtatatcatgccactctctcctggcctgtaaggttcccaccgaaaactctgctgccagacatattggagcttcattgtatgttatttgtttcttttctcttactgcttttatgatcctttctttatccttgatctttgggagtttgcttccttgaggtagtcttcttcaggttaaatctccttggtgctcaataaaccttcttgtgcttgaatattgatatatttatctaggttttggaacttctctgatagtatccctttaaataaactttctgttcctatctttttctctacttcctctttaagaccattgaaatatttgccttttaagtctattttctagatcttgtaagtgtgcttcattgttttttattccttttttttttatttcctccatgtattttcaaatagcctgccttcaagttcactaattctttcttctgctcaatcagttttgctattaagggactctgatgcattcttcaatatatcaattgcatttttcatttccagaatttctgcttgattctgtcttgttattttaatctctttgtgaaatttctgatagaattctgaatttctttgcggtgttatctttaattttgttgagtttcttcaaaacaactattttgaattctctgtctgaaaggtcacatatctctgtttctgcagaattgatccctggtgccttatttagttcatttggtaaagtcatgttttcctcgatggtcctgatgattacagatgttcatcaatatctgggcattgaagagttaggcatttattttagtcttcacagtctgggcttgtttgtgcctgttctccttgggaaggctttccaggtatttgaaggaacttgggtacaaagcctaataatgcagtggttcttgcagactcatagaggtaccactatggtggccttagatttaatctgaaaaacttctctgggttaccatgcagaaactctcattcattttccttactttgtctcaaacgaaatttctctttctgtgcagagtcacctggaactggggttgggggcacacaagcactcctgtggctaccaccactaggaatgtgctggttcagatctgaagcaaacacaacactgggtcttgtctatggcctgctgtaaccactacctggctaccacctatgttcactcaaggatgtaggattctatgatcagcaagtgggcaagccagtcatgtttgttctcctcccttcagagtggcaacttccctcaggccctgggtaggtccagggatgctgtctaggaaccaggggttgaagtcaaaaaccttagaaatttacttgatgttctcttctactatggttaagctggcactcaaaccacaaaagagtcattcccactcttccctcccctgtccatagacagaggagcctctccctgtggccaccactaccaccagcccacacgggattcttccaggccaccactgatattcacttaaagcccaaaggctcttctgtcagcttttggtaaatgctgtcaggcctgagacccacacttcagggcagtgggttcccgtctggacaatggcaggtccagacatgctatccaagattatatgcctggactcagtgactccaagtgtccacttggtgctttaccccactgtggccaaagctggtacctaaagtgcaagacaaagtcccctttacttttccctctgctttcctcaaacagaaggagtctttcatcatagccaccacagctgggaatgtgctggatcacatctgaagccacaacatctcagggctctaggtccttggcatactaacttgacatcactgttggttattaagggcttaagggctctttagtcagcaggtgatgagccctgctatgactggattcttcctgtctaggcagcagttccctcttggaccatggtgtgtctaaaatgtcatttttgagataggccccagaatgtggccttacaactctgcccagtgcccttttctactgtggttgagctgatatccaagatgcaagacaaagtcctctttcctcttctctctcctcacctcaagcagaaggaaggagtcatttttgttgctgcaagctgcactgcctggggttgggagaagagggccgcaagcactcctttagcctccccatctggtatctccctaggtcacatgccatccgaatctactggctctaagcccagcccaggactaggaattgcctaggaattgaagtctttgtgtcctacagtgccttttgagtttacttagaaccccagagcgctttggaccatggtggcaaggcctgccaagaaacttgagctctgactgctagaataggtgattcccctctggctaggctcgtccaaattctctgtccatgaatgggcaccagctgagtccagcagggcttagctgtgcactgtgacagggcagcactgagttcaatgtaaagtcccccagtcgctgtgctgtctgtcccacaattgcacagactctctctgtgtgcatcttgcattacctggcaggctaagagctccccttctaatgtcacttgcctaagacaaggtcccatagctgtagcgtattcgttgtcttttttcctgtctattggaggaggggggtcagacaaaacctctgtttcctctgctgggaaaagggggagggatggtgttgatgattcaagactatctcctaccctcttcagagtctctttagcgatatgaagttaaaaccatgcactgtgagtgcccacctgatttttggttcttctgatggtgctttttggtgcatagttggttgttaaaatttggtgtgtgtcagcggggatggcaaatgtagccttctattcagccatcttactctgctctcctcttcctttaaaaattattttgcttagctgtttttgcttgtaggtcccacaaaaacaggcattggactagattttgccctttagctatagtttgctgccttctgccactgactgcttcaagatgatagcagtgccctcctaggctcttctagggtaatctgagcaggagcagactggagtggagtagccatggtaaatgcatatgagaacacgggcatgttgaatgaaaggcaagatttcaagtcagacagaagcttgaaacagtattgcaaactcagtgctgaatttgatcactaattaagaccttgtagattctttgtgcttttatctaaatcctgttatcactctgcaacttttaggactaattaatgcaggctcatctatccttgtactacctcttctagcatttagaaacaatcatcaatggttttttttttttaaactatcatcaacatgtatttgcagaaatggagagccaaacatattattttctatcctttgtgctgcctaatgctttatattaggtttattccatctgtgtcatcttagctgcaaaaggtagttccagcaaaaggtgaaggtgttcagagattgatactatgcaattaagacttaaggatactaatcttaaacttttatttttagatcttgtccacgatgatagaatcgagggtcacttcccctcttattcattaacgaatgttttaaaaagttgcttacaaattatataatctttaatgcttttataatacaatccctgtggataccagagaatatcatttccaagtcacaattttaggcaattgtttatctcaacttctagatattttttccctcaaaatgtcaaaatttggaatatccagtttcatagtatagcttatccaacttttaatagtaattattaatgtcatgattttttaaatccaatttttctcagaattagtttgcagcctctgtatcagcccaaaccatctgctcttagatctgttggtttttccaagtaggagacctttcttatggttttcactgaagtaatacagcactttcattttggcagggggaaactgggtttagcctttgaaagaaagtctcttaagacactgaaaatgcactttcaattagtaaaattagcctttatcacttaataaatgaagtgagtctctttatccattttatatcacaaagaattaaaatctcctgtcctttgttttaattggtgattgaaaatactttttcatctaaatgtattagcactgagcatgccctcccctgttgtgcttcctgtttgaaaagctaattaaatggtctcattgctgattggctggaagcctatacaacttcctggctgcaggccattaacaccctggccagaagtgctgacaaaaagatgaagagatttacaccctctgatttctgtattaacaacaaggacaaaacagtatgtggtcttctcagtggataatacaatttaaagataggatttctttttccacaggtgcatttgtctctgaaaattagcagttcagcttggtgtgaataataaggcatcttctctgatgagtttgaatcatattaaaaaatctgttatggacaagttcaaggtttataagactattaccatttctctaaatgaaagaacccaagtcagcttatttctagatctatgttctgattacttaaaaaaagtactggaaataacaagtatgaaaagtgttctattctataaaggcaaaatacatacatatatataaatattgcaaaaaacatttttcttaattatgtcagttatttaacataaaattactttttaacaacaaaaaacaatgccctgtgataagattgcttttcccaatgaattcaccactggttttaatagtttaccatatattttagcaagaaaacatgtgaagcaaatgtgtatgtgtatatacagaagcccacataaaaatagagggatatatgtatatatttgactagacttttgcatatataagtatacatatacacacacccctctttacacagatatctatatatacacacacatatatatacatacaagcacatgtatgaatattaatcatgcacataaatacacatataaacatgtcacaatataatacataatataaccaatttaattggcttttcaaacaggaagctcaacaggggagggaatgctcagcactaatgcatttagatggaaatgtgttttcaatcatcaattaaagattagatgtggagaacctctaatatataagatatggaactaggaattggagatggggtaaaaatctttactttttcatattcattatatattctttcataaaaggaaatgattgaatatatttgatcagtaaggccctttctagctttaaagtgataaatctaagatttgtatatattcagatccctttcattaaaccactagggagttctgaaaatgatagtagatgagtatggaaggacagaaagaagtaacgaatgaaatatcaggctttcaataattaatcagccaatagccattgaccacatactactctaaatgtgctgtgctgggctgagactacaaaacaactgaagtctcattcttacttgtgagaagcttatagaatgattttggacagatatgtagctattgacatgaaagccatcaaggtaaagcagggattgagaagtggggtagaaaatttataattgggttctacgtttcagaaacagaagtcactttacaaaatatagagtgtactgtaaatcttgtttgtacagttaattgcttacaaaacatttattagttgtttcaaagagaatccaaccctttagggttgaaattattataagttttaaattctgaattaccataatgaatttttcataaattgaggtcatcaccaaaatattctgcaatgaaaaggaccagtcatcagaactttaagatgaagtcattcaattgaagcagaatattttagagttatcttaatagatggtcctttgcctaaatgcacaaaacaaaaataattcttactgtgatcagacttaaaacaaggagagtgttatttggtgtttttactatgcaagacagtgtgaatatccaaagaaatatagagtactatatctgaccttcagcaagctaaaatttaattggatgaaaatatggtatctgtaccaataaatagctgctgatttccaaatgagtgtcaatgaaactaagatctatgcaatatcaacaaagaaaatagaaaaatagatttgatttggttttaggagtttgagttaaattccgatattttagctgtgcattcaacaaatatttactgagtgtctgctgtgtaccaggcaaagaggatgcaatgttgagcaattccaaccaaggcttaacccttatgagttgggaaagagcaaactaattgaacacagggttggagccagagggaggcatagctggtgaggtatacaggaaaatataaagtcatgcttaggagctcaatgagaagactagtggggatagaacatatggttactgataaagaaatataggaaacaagaattcctagtaaatgatttcataaaaccgcctaaaacagctcactatggtacatatcaggtaagaaatttggaaaatattgatgtgttatgatattcccagatttaagcttaaagttaggttaacactttgtaaatttactagtgagagattaccttgaagacatacctcacatatcactcataggtggccccagattgatgaactctgttggtatcttaatagatagttctatatctaagactcagttccatagcaattttccaaaaggacaaactacaattacaataaaatatcgatatgtgtctcaaatactgttctgatgtagaagtatctatgcgtcactttaaatatcatctcaaatccccaaattctgaggctaagagaagagtaaaatatatgaaaagagtttgcctcaaaggacacaaactttgattcaaagcaaagtcatagaacctggcaaaatttaacataaattcagctgttttaaatgtatgttcttgatcttctcttccttgaaaagcggaatgactttaaaatagcaatatttagacaacctttgggaaccagagttctatctacaaaaccaattaaatcagtgtaaatggtgtaaaattaataagaaggctcaataaatgacaagatagcttagttataagcaaaggaaataataatttcatgttcaaattaatgctcaaattaacttgagtcggtcagatttctgtaatattggggttttcattgacttctctcttaccataagtccctaggcttgtttttaagctcctctattaagaaccctgatgataaatgttgcctggtgaactctgcattttctactagacaggcagctcccttagggcaatgatggggaatgtttataatttgcttcagtagcttcagtgtctggtgtgtctattacattagttttgttaaattatgtcctgaatgattgacataaattatgtcatgaatgaatgacatggatgaatgtaaagtctgaccacatattaggttgtttaaacatagaatcacaaagtaatgtatttttataaatgatagaaaccttgggggtcaacctctctaacctttttcatttttgagattcagagattgacattgaataattagcctcttactcctgtttaatttttaaccatatctcttgctcacatgtattatattttttgctatcttccataccactgcatttttatacctacataacctaagcaaaatcacagcctaaatattttacttggaaactgaggtttgttcttgacccatcccttttcctcataaacatattcaacattcaataggttctgttcattatacatcaaaatatagctagactttctcctttcttccatcccactattaccttacttgtctatttccttttgccttgactgctgttaagtttctctctgagattcctgcttccactcttgtattcaccaccaccacctcaaactattctctatacagcagccagaatgatcttccagatatgtaaatctgatcacgtcatttccttgcttaaaatcccttaataacatctcagtgtggttgaaataaaatgcagacttactaaagtggtggatgacatctgaattatccaccctgcttacagccccaggttaatcttttgccatgttcctcttggcccactgagcttcaaagcccatgtcctattgaaccacgcatcttttaaataaatacttcttgatgctttaatacttctttttaagttcatggatattaccatcaggaaaggtcataaacaagcttggaagcaatgttgttgctgattctataaaaactgcataagtaccctgacacttgaggtttaaagctgttctgaagggataatttacttcctaccacacatacctgcagccagatagtggccccaaagaagcagggtagaaatatatctgacttcccaggtgtgtcctttccccatctttcttctcagactaggtgtcatgtgatataactggacccaggagaatgaccccacaactgaaagatttttatgaaggatgatttactattctccaacgtactgacatttttctacagcccaatcattgctggggagtaagtacagaacaaaatgtgttgagataaaagatcatttcaggcttttgtggtgagctttgattctggtgagtttgagacacatttcagactataaactttagcgtcaaacattgtcattttcccttcgagtggctattatatcatgttattctgggtcaggttatcaaaaatttggtaattcttaaacaagttttgattttttcagagtctcagtagagaaggttgaaaatcacacaagttacatagttaagcagaaatattttggttttccattttcattgtgcaaatgcatgcacagtatgaaaatgcattttattagctccaattttcccccagtaggtacttccaaattgaaattaaaattatatagatttaccagaagtctttaatctaaattattatttctgttgggatttctggcttcttattttacaaaatggattttatggggaggaaaaatatattaaaattataagaggaaaaaattgactccttttggtatatttgatgtgaatcttagctattaccaaattaactttaatgaattatataatacggaataaaggctttgggcagactactctctctactgcatctttgtattgaaaacttgtttcatttaggcttctccttttttttgtctctctctaaagattttgaatatagcactcaggcacatgtctttggcaggaaaaaaaatcacttatattgagaagagggtagtcctatgaaacaaatgtagagtaaaaagtattgccagagaatctcagcagggccatttacagccatatgaaggcaaaagcttatattaataaacctaatacagtgcctggtatgtattcaatgactgccactgggaagaagaaaaataggaacttgggttaatagacggtcagatagaagatcatttaatcctttgggtaacatgctcaattaaaagtttgaaacaattataacccaataaattcttgtttcaatgacctttgaaatgaatagggaaatgtcttgccaagtttctttgtttatgaaaatccttgttagggttttgtaatgtttccttcagaaaatatgctggatgtgaattctgtattcctaccttggaattctgaaatccagaagattgaatcattttctgaacagtaacaggacttaactataacatagcacaagttgttacataacatgatataacatgttaatataccggaaacatatgttactatctgttaattaatttgggtattagtcaatatttattgagtgctactgtgtacctagggaataataccaaaacacaggagtcatagattcccccctcatgaagatcacagtacttctgtagtcaaaacacacaaggcttataatacaatttaaaaaaaaacagtatcaggctctcttatgaaggagaaaaaacataagttttcgaactcactgcttcccattatttactgacttacttgccatctctaaaaacatgtgcagtctttagattcactgttttttctttacacatgttgcttctctgtctagaatgtccttttgtatcttgggcatctggtgaactcccattctttattccagacccagccatagtccaccatttctgaagctcttttctgattattgatttcccaataggcatcactgaggattacgctatctttgctccaccagcatctttcatttttgtcacagtgcgctatgctatatatttgcctttcctactagactatgaactctttgaggaaagaaactggtactgttcatcactgtattcctcaggcaattaggatgatccctggcacatattagatgtccaataaatgctgactgactctggattccccagaaacaggacacatacacacacacacacacacacacatgcatacacacaatataagtatgtatttatattatttttatatattaatatatgtttatgtgatatataaatattttatataatatataggatctatccatctatttagaaagataaatagagacagagaaagagattgatcacaaggaattggctcacatggttctggaggcttagaagtcctagtatctataattggcaagctggagacccaggagacatgatggtatagttccagttagaatctgaaggcctcagaaccaggagacttgatggtgaaagttccagttcaagtctcagttcaaaggcaagagaagactaatgtcccagctcaagcagtcaggcagaagatgaattttcttttattctgcttcttgttctatttgggcctttaacggattggataaagcccacccacactggggaagacattgttttattcagtctattgatttaaattttaattttatctagaaacacccttatagacacatccaaaataatgtttggccaaaaggctgggtgccccacggcccagtcaaggtgacacgtagaattagtcaccacactgactgactgactgaatgagtgggtgatctgggaattctcattaagtaatgcagtcagtgcaggtaggggtgcatggaagaagaaccttgataaaatagggaaagggtggtgacagtgatgtgatgaaaaacagaagatcataccaacttaaagagtttgcttttctgcttttgaaggatttgcctatcctgaattgtgcatacttccaagtaggcccaacaaatatcagccgtattcacaatcaacttttatgagcattgcaaccattcattagccatgtgtaatgagatttttagcttaatagaaagcctcagcctgaattctgtaaaactattcattactattgattataaaccaatctcaggtttttgtattaagaattttatatgcagaagaattaaaattattgtcaaagcttgtagaggtaaacatgtcttcatgaaatcaatatgctcgtgaagagttgcttgcaaatttcactgaatataatgcactgaatagagtattagaaacattaggaaagtttccttttgtatttttaaagatatgcttgttttagaaaaaaatgagcaatataattttcgctcatttaaaaaaagtttattaacataattttctatggatgtataatgttatgtacagtggatatactataatttgcttaaccaattaccaattgtgcaattagcccattttatattttttactattttaaataacaatattgaatacatatgtaacttttctttttgtatacttatgtatggattcctagaagaaaaattgagttaaattggtttttttgtttgttttgggacagactgttgctgtgttgcccaggctggagtgcagtggcgcaatcttggcttatggcaatctcggcctcctgggctcaagtgattctcatgcctcagcctcccgagtagctggaattaaaggcgcacacaaccacacttggctcatttttgtacttttagttgagtcgaggtttcaccttgttggccaggctggtctcaaactcttgacctcaggtgattcgcctgcttaggcctcccaaagtgctaggattacaggtgtgagccactgcacccagccgtggttaaattgctatgatgcaaatttcaaatcactttactgaggtggtgtatcaattcacactttcacagtattgttaattatcattttaagaggttttttgcaacactgataggctaaggtcctatctcatttttgttatattttcagttttaattactagtgaatatttgtccacattagaaatttaaagaatttctatagaaaatcttacattaaagtaaaacaagcaaataataaactcctagctgatctacacattaagtatgagtctgcatttggcttaatgcatactcacagttaagcgacctctttcagtcaccaaagatgacagcagagctaagatgaaagatagttgccactattcattatttgctatctagtaccttctgtaagaaggacttcattctaactttcacatacataaatggcattgatgttcagtataatttgattagattttaagaagaatctagaaagacaacaccatgtgagtttgaggaagaggtggtaaaactattatttaaccttgtgctcagaatagatattataatatagcttgactggaggaaataaagttattaaaatgctacctagaacaatgcttcccaaaactgcctctgttggccctataattaatcaaagatattgatgggacaagccagctcacgcttgtctgattgttgatactgaaatcaagaggagcaggactgttaggacacgttgtagttcatgtctgatcaccacctccaggggaaagctgggtaggggctgaaatccagttctggatttactgggtgattctgtgcagtgcctttataaaattcattccctcagagacagtatcctttcctaattatacaatggggcaaagtatgaaccaccaggggtcctgaggatattactaagaaggatgattccggagaatcctgaattactccatggctttgaaggccagctaagaaataacctagcaatgctcttaggtgagattatgatagaccaggctttaaactgactcttggtcatggggattataggagtccccaaatggccgtctgtttctgggtctcatgtatagtcaggctttcattgcttcaaggatctggaacagtaccaacactacagaggatgttatattggacaaaccccaaagatgattctgagaaagacttagttgatggccttactccttgcctatttttggcctagggcaagaggtcattgtgtgctgctaagcttgcagagctggacaaactccaggtaatctcattattccaaactgctacagactatgttggaaagtgacagagccaaagctcaaatccaactttcaaaatttggatgtctgcaatactctattcaaacatttagagtcacatagaacctcaaccaatatttgtgtatttttttctttctgtaaatatttgatatacttcacagaaataaaatacagaaaacatccacaggaatgtagaaatacttttcaagcttttatttatccacttaactttttaatagtatctgcctatagtatctgggtaatctgcctatactgtttttctttccctttgacatcctttagaggttcattcatttggtcatgtgattgcttcttataagatcacatagggtgaacatcgctggcacttaccagacatgcttaccaggacttcctttgcaatgtccaccatagagcaattgctcttcagccaaccacctgggagtctgtaattttgccagtggaaatgaagcaaaaataaaaaggagtgggagaataaaaaaagggaaatgatagcttgcagagggatgtggcaagtacaggccaaaatgagcttctaccaaatgccctgcatatcttttattggccttctggctgctttttgaaaaggactaattctagagaatgtctctttggcttgcctctattctctgccttttggctaatttgagaatttaaaagggcaaaggaggtctggctttgaagggatgtaaccttcaggctttaatttggagcaaacaaagcatttacagccgctctcctctggcagttgcagagtattaccacactgctgaatatttaaaagcaaggcgtgtttccaaccccaaggtctgtcccccaattgataagtctctttttattaaatgaactttaattacttaataattagaccttccacaggagaagatgtggatcctgatagtctgccaagaaggctagagggcaaatcggaagaatgtgccattttcagattagaatttaaaagaaggaacaggcccattctgggggtgtgtgggtggaggagagacctccctagaggcggcaagtcttggcataaacctggactgtgaaatgctttatttccacttttgcttgaaaactaaagtactttagaattaaatgaatgagagtacatgtcgaaaatattcaaactttctgactgtctggatctgatggaaagatttcttgtcgtctatgcagtgtgtgtatgcttgggtggaagggtagggagagactattgttctccttattttgattctgagagcctaacacttttgatgtccctacagatttagcagctttccattcattgccatggtgattttttacctcattttttttttttagcatcacaaaggaaaagcccaaatgaaaaatgtttgcttcttttgctattaacatttctactgcctggtgacagcaaatatttgggttgtgcctagcttctgaggaaatatgtattggtctgaggagattgatggccacagccattgcccaggctgtcccagctgggtgaggggctggccctgagaccactgataactttgttcctggggacagtgatgtgaagggaggatgaggaaatcccattcaaaacgtctactgatttacaattgaactgtttgtggcttagataatattttcacaaatgccttatggatagcctctccacacctcaccacctctacaccaacccatctcttcaaatgaaaggatttattagtctcagctcttttctgctttcctgaaaaaaatcactgcttttcccttctcctattttattatttatttattttttaaagacaggatctctctctgccacccaggctggagtgcagaagtgtgatcatagcttactgcagcctggaactcctgggctcaagtgatcctgccacctcagcttcctgagtagctgggactacaggtgtgcacctccagacctggctaattaaaacaattgtttttctttctttcctttttttttttttttttttttttttgagacagagtttcacttttgttgcccaggctggagtgcaatggcaccatgtcggctcacagcaacctccacctcctgggttcaagtgattctcctgcctcagcctcccaagtagctggggttacagacatgtaccaccacgcccatctaattttttgtatttttgatagagacggggtttctccatgttggtcaggctggtctcgaactccggaactcaggtgatccgcccgcctcagcctcacaaagtgctgggattacgggcatgagccaccgtgcccggccttaaaaacaactttttttttttatagagacagaatctctctatcgtgaccaagttggtctcaaactcctgtccttcagtgatcctcccaccttggactgccaaagtgttgggattataggcataagctaccactccaaggctcctctaactaattctttatgctttcctagttattgcttgtgtttcctaaactttccaatatttagggtctgaaacatttgcttaaactgattatcttaacaatgatatatatttttcattcaacatacgtttgatggccaagtatttgccatacaccatgctaagtgcttacagtatagaataacatagactcggctctgatttgtggaatttacagattagtctggacgatggctagcaaataaattccacagttaatcacaattgaagtaagtgctggagataaaacctgtaggacaactggttctatccggacttggggaaagctactatgaggaagtgagaattctgttactgcattgaactattaagtctcaggtattcaaacacactgttactgaagagctgcaaatagggtaaaacctttactcttccttgcatggatagttaataaatgttctaggaacaaattggggttacggctgcttaacaggcattgagcaacacttaacaaagtaacatataagtagactcctaatgaatccttttaatgttaaaattagtgttatagaacaatggaagatccttttcaggactcaaaataacaaggtgagacccatttctctatggcagtctcataatggctctatatctcttgctaatagcacccaatgcttactgtacaactataattagaattgttgacatcaatataatttttgatgctgaagcccaggcacttttactttgtattaatcacttataaaatttgaattaaaactgtctttatcatttctaagaagattaaacagagcttccatatgtgtctgacttttccatatgtaaaacaaatgttctttcctttttatagtttctcactaataagttctgatctttgttaatgcatggagatacagataatgtggaaatctgtaagttggcttgtgtgggacacttccaacaacaccaggtgttcctgtatttaaagctgccatagcatcttgggccagtctaggtgtgaaggtaggaactttgaaattcattctgggaatcaaggttttcctaggctaacaatgtaagccctgcaaaatcaccaaaaattgtttgtctgctatttttaatagttaagtacttcaggctgaaatttgtctataggaattcaatgtaaggcagaaagtacttactaaacaacaaagtgtattgagtacagtactgctacttgagggtttgaggagtgaagagtattgacatataaacgaacgtctttttgaaatatttttgtttatgtcagggaaataaggtattttaagaagtataataattcagtactaaacctttaaaaataaccatcatgggctgtgtacagtgactcacgcctgtgatcctagcacttcaggatgccaaggcaggtggatcatttgaagtcaggagtttgagacaagcctggccaacatggtgaaaccctgtctctactgaaaatacaaaaattagctgggcatggtggcatgcacctgtgatcctagctacatgggagactgaggtaggagaattgcttgaaccaggagacaggttgctatgagctgagatcgtgccaacacactccatcctgggcgatagtgtataagactcgggctcaaaataaataaataaataaataaataaaaataacaatcatactataaacatttgaaagagtttggtaccagttccatctagaaagtggagataataatacttcctaaaagagccattatgaagattaaataaggtcatttataaaagtgtttataatggcataaatgataaaacaatccgttcccaaagtcctctagcttgttaaataatgaagcggggaagtgactccaggtaatctcattattccaaactgctacacagtatgctggaaagtgacagagccaaagctcaaatccaactttcaaaatttggatgtctgcaatactctatttaaacatttagagtcacatagaacctcagccaatgttttgtatcttttttctttcagtaaatatttgatttacttcacagaaataaaatacagaaaacatccacatgaatgtagaaatacttttcaagcttttatttatacacttaactttttatagtatctgcaaattgtgagtactataaaaatttaaaaggtggagtgatgatttccagtaagtacgactaggaaaaagggagagatttttgattgagtacctaaaacatgactagagatttgataggtagatgttagcagagagcgtgttcctttttagaggaagttccataagaaatacagccaagaggaaaccatgtttaggacatctacaagttcaatagatctgagaattgttttgcagaagttgtggaaaatgaacctgaaagggacatagtgctagatacctgggcacatattaaacaaaaaactctttgcctggttttggggcaaaagacaatgccagaacattttgggaacttcaagatttcctgagtgaagcaaaacctttagtgatgtaggagcactgatattttgactatgtttggaatgcattcgagtgaggaaaacagagagataggaagaccattgctgctatcattacaacggatcagatgtggcctaatgagtctgaaccaggctttttccatgaatgggctgtggttgagcaggtaactatttttcacaaggatctagtgaaaattatacctgtatctctctctggatgaagcttgggaatcatttgtattgcattagaacattagatgacttttacgaaaatatagtatttcatacgtatgcgttatagtgagtttattgttcattactagatattcatgcacataccttgaaactatagtactaagttgatagtctataatttcttcttcttttaagactgttgctgggttgttacaccaccatgagatgtaactgctaaaatttagcacaatattgggagcattcagtcaagccttatagagccttataaacttagaattgcttttgaatgtgtagagtttcccatttagagacaaaaagaaaagactatgcatcatgtttataatttctcactatgacaaataatcaactctgtgaaattttcaaacattgcattgttaacttttaaacaggatgcagttctggccctggcttgttaagatctgaaatcatcacagagtgcatgcaattctattagccaattctgttaagtctaattatattaatatgcaatcccagcctttgtatcgaattcttccaagtagatgaagtttacataggaaaccaattgttgagtatcagtttgaattactatttcattttacatattccaggctctagaacctacttgcaaatacatttttgaatgcaaaagacattcggatgtaaaatagatgtttaattttctgttttattatttctttttttgagacaggttctcactctcttgcccaggctacagtgcagtggcacagtcttagctcactgcaacctctgcctctgggctcaagtgatcctcccacctcagcctcccgagtagctgggaccacaggtgtgtgccaccacacctgggtaatttttaaaaatttcttgtagcgacagcgtttcatcatgttgcccaggctggtctcaaactcctgtgctcaagtgattctctcacctttgcctcctaaaatgctgggattacaggtgtgaaccaccatggataaatggtttaaatgctttaaatttatccaatgtgtatgacttctaaagagccataaatctgaatatataaatgtccagattattaaaatcaacttaaaattttattctcacctacatatattaaatacataacttgtgtatattggaaaattattcctgactatatttccttaactacaaaataaaatactagggatgacaaccaagaagaaaactattaaataaaaatcaaatttgtgcgaaactcattgccctacataagcctcatatctgtcactactcattgcagctttgctttgtgtggtagacacagatcatgctctgtttaagtacatgccttaaatccatacctgagccaatctgtagtagattaacgtacttctttggaatagacacaagactatataatgcagacagtctggaaactggattttgagcaataagcctgggtacaaggtaactaattcctttcgttcttcacccagtggtagatgcagcacagacacagattagttctaactgaaaaagaataaaattaggcaagtggctggcgccccctgtaggcaatctgtagtgtttatccaggcatccccatggatccagatttcagagccttagtttaagaatcagatgagtaattttagaatatatatgtgagggataaattaatatttgcatcaatattaaggtttttgcatggtatagcattaatctttcttacaaagaacaatcttaatattgcatctctaggattgcaggtctatttctgtggatgtagctataatgagtgatatccttcagcagcttgtacctaacccacatataattttggtctaattttatatttcatagattcagttattttgtggtccaaaactctaatccctaaaagagacgtaaaatttcaccttcacttagggagggaaagtgaaatagcatcgcttattgtctctcatattaaattatgatttgacccaggtcattttacctttgcccttttggccacagcaaaatttgtatcaggttgtggggaaaattaggatcatgaaaattaatagacccaaattaaaactaagggtaattaaaactgaacacagtagaattttgtttactgaagattaatgagacaatcaagctttctggacaaaatttaaacctggacctggggaatgttgacttaaatctataaaataaaaatcacagtaacataaaatatgattagtaaaacttgacatgaaccccagactgatgaatggatcaaagtttattgtgacatgtgcataaaattaaaacaattctggaatgagtcaaatgaaaatagaaatatcagaatttaactgggatgaatagcaaacataaataattattaaaatttagttgaattttctctaagaatttgccagtggtctttcattgatggcacaattgataccaatagatttctttgtaataatttaaaaaaacacaagaatttcatggtcaaaacttaggatcacaaatatccacttgttcatatcagggggtttgagatggcaaggtgaaaacacctacccctctcatgtacaacgtcatggcagagaagccttctctctcaccatgcttatgcttgtatgcatggtgatgcatacaagcatgtatatgcatgcttatgcttgtatgtaatggccagtttatttgttttattttttcatgcatgcttatgcttgtatgtaatggccagtttatttcttttattttttccttatattggtcattcatatgaatgaatcattttcacatgttatttcatatgaacattgaagtgactatgtgaattagatattaccccatttcatggcccaaagaaatgaaacaagtttccaaagtattcatatgtaataggtggctcaactagtctagaaacacaagctatcctaattccagcttttaaatcttttcactacaccacagccatacctggcaaatgtggatgaacatttaccttaagcagtaaaccctaaaagacaatcctttgttactataattggtggttcctatcatccctctttcttgaagctgctctaggtcatgccgtatgacgagtccttcatgaatcttcatgacttcataatcctttgtccaaagtggggtaacaggaattctgtccataggaccaggattcggaagaacaagttgctgtctgtaggactgtcatctaaaaactgaactccaatgtgggatttcacttctctgaacctcaatttccttatctataaaattaggctaatcttatctactttgtttattttacagggctgttttatttaccaataaataagcttctagagatgaatgacaacatcttcattactttttagcctctgagcatactgtagtgccagacagaaaatgtggtaaagtgtgaagagcaaatgagacgatatttgagaaaacagcttgtaaaatataattttctacaaagaatacaaagtgattatttttattggcgattattgtgctttatttggaagacttattcttccttctttgtttttctcctaggaccactgaggttcctttcacagacagaatctgtcacagccttcatgggagacacagtgctactcaagtgtgaagtcattggggagcccatgccaacaatccactggcagaagaaccaacaagacctgactccaatcccaggtgactcccgagtggtggtcttgccctctggagcattgcagatcagccgactccaaccgggggacattggaatttaccgatgctcagctcgaaatccagccagctcaagaacaggaaatgaagcagaagtcagaattttatcaggtattgcaatgctctttgttgccttcagaatgatattctctggaataagttgaaaaacaatttttttctttaacagatatttgtaattgttataagttctgtattgttcattgcgttttgtttattatttctttcttccttgccgaagcattcaatcaggttgtaccaaaagctgttcttttttttttttttcatgtcttgttgaagtttctggaaaaacagttatctctcctttattcattcacttgttctattaatatttagtgagtatttctttgtgcaaggcccattgataagcatttctcacatattatttcattttcctctgataacagtctaagaggtagttttgattcatttcaaaggatgaaggtgaaaatttgcaacgttaagaacattccctaagttagtattgaactatagatatatgatacatatagatatatatatgtatcatatatcatatatctatagttcaatattaaaattaggctgatcttatctactttgtttattttacagggctgtttttttttaccaataaataagcatctagagatgaatggcaacatcttcattactatttaggctctgagcatactgtagtgccagacagaaaatgtggtaaagtgtgaagagttctcttttgtatattctgtactccattagtcacagggatactgacttaaatgtatcaataaccagtgacaacacttacatttcatctaccaggcaataacagaagcaaagctagcatttattcccagcacatacatgcatctatttacatttccattacatacacaaaattttaaatatatcatacatatatcatatatatcatatatacatgatatgtattatatatataccctatatacatgatatatatcatatatacttgatagatatcatatatacatgatatgtcatggatatatacatgatatgtcatggatatatacatgatatgtcatggatatatacatatggatatatacatatgtatatgtatatgtatatatccatatggatatatacatatatcatgtatatatgaatgatatatatcatatatgcatgatatatgtcatgtatatatacatcatatcattcatatatacatattttttttagactagggtcttactctgttgcccaggctgaatgcagtggtgcgatcacagctcactgctgcctcaacttcccagtctcaggtgttcctcccacctcagcctcagtagctgggaccacagaattgtggcaccacacccggctaattttttgtatttttttgtaaagaagaggtttcatcctattgcccaggctggtctcaaactcctgggctccagcaatctgcctgcctcagcctccgcctcccaaattgctgggattacaggcgtgagccactgtgcccagcctgaacaatcacttacttgtccattcacatgcttatttctgagaagcactgtgctaagtactaggaatccggcagtggcaaagactgtcccagagcctggcccattagagttctgggtggatgcacacatgtaagtaattacaatagggtgtgattgatatgatgattttaaaaaagtcatttctctccaactcttattttactttctcttctctgggaaatccctaagacactggcctcattttgcgattctaattagttagaatctcatgtaatgcctactttctcttttagccgaacttgtaagactgacttagacgctcttgtgagaatcccaaaaaaggcacacactggagaaattggaactgactacatctcaaagtatggatgttggcttcggtctctgcgctcttaactgtgtatagttatcacaagtacttcagctatgcagagagtagcattcttgtaattctaaaagcaaactggcaattcaattgaaagtttccaggtgctttaatgaggacatctctaaaacctctcttttgcagattctctactccattagtcacagggatactgacttaaatgtatcaataaccattggtaacacttacatttcatccgctaggcaatgacagaagcaaagctagcatttattcccaaaacatacatgcatctatttacgtatccattacatacacaaagttttaaatatttatattcacatattattaataatgcatctgttgagtatatcagatgggaagccaaggtaagctgcatggaaaattggcaagcatatgtttatcttaatatgacaggaaaatctgttttccagtggtattaaggaatcaagttgaactaatgaaatattaaatttgaaatgcagttttaaaagacacagagacattataatcaaatccccatttacctttgtttcttcaccttgcaacagccatttgcattgtaaaccatggagatttattttaagccaaattttgttttcttaatttgcctaaaatagagaacatgttgtacttttgagatgtgtgagcatttcttagctgaattgaaactgatatttttgtaaaggcatcacatcaaatgagggtttttatctaaattatatgaattcaaatataaactttagaaaaaattgagttaagatagtacgtgcatgtgtgtacacatgcatgcgcacacacacacaggttattgtcatacttggctaagcctgtctcgtatgctagctgccaaataaagaacctgctaaaggagaatgcttttaacacattctcgagtttgcaagttggtttagaggtcaaattcacagatgcgcaataagtacaagattgagtgagtgcatgaatgaatgaatgaatgaatgaatggcaaatctctgcttctcttagttgccacttagcgttctctcatttcaaaaatcatcgtaatcctttatgaatcaattttcactctctgtaagtaccaatgtgaggcagtaataaattacatatataatacatatgtgtgtatacatgttaatacatacatgcacatatacaaacatcatattattggcatgacttaggactattcaacatggtaccagaatggttagaactcttgaaaggtatatcttttcctggagtcactaaattaccatgttgactgatgaagtaatttatatcttgctttagtttgagatgtagatgttaatgagaaattttgcaactttccccaacattaatttttaccatagttcataagaagtgtttgaatttatgtgtgtttatagttatataattctaaataatatttaatgtaatatacttattcaagtctatgtgaaacttatttcaggttgcctcttttatatatcaggtgtcttctatcaccaagtaactgaggtctattaaattcagagtttaacaaacagtggttttaaagtgctgtctttcagcgaccagtttcactttattcattacgtaaatactttattcaattaacttttgaatgaatcttacatacctgacatcttgatgtttgctaggaatgaaatgttggaataccatgccctacaaaagcttatagtccaatgggagaaatagacaaagcaagtaggctgtgctgtgagagaagaaaacacagagcaccattaccctcataagagcaataccaacaagtactagctaggcaaagagaagtatacaccatggaaaaagagcagcacgtgaaaagcataaagaaaatagagatcaaaagcttttcaggcgaactgtatatattctgtttgactggctcataggcaggaagcgataaaggggaagaagctggaaagaagggagttaaatggtaaggaggatgaggtggaatgctacagcgctcatcctggagagaattgaccaaaagcagctactaaggcaacatcagagaagatccagaaatgatgtttggtttggtcctggaaacatatcacatgtggcttatgggtgaagggatggaatccagactctgacagaagctggttagtagcatttttcattgagactggaagtgggagagtagtgttattgtgtttaaaacaaattatagattttttagaagatattttcccataaagttttatctcttccagattaagataattatttgtttcattaaaggtaggaaaattagtacctagtttcatttgttgattaatgttttaagacaaattgaatttttgctatggaaattatacatatgtaacagaatcagtaatacattgtgctaaagcattttttaaaatatcaataacaaaacactaagagttgagatgttttacaatgtctgattgtgtgtgatggcgaacatgtgatgaatggaagcagccattgtggttgtcaagttcactttattcatgtcgcatcatgtctgagtgccaagcaggacattgaattgcacaattataaatctgctttgggcactagactgactacaattactggcctatacaatggaattctttagtttgcctaatggcctaattgaattgatcaattggtaattcaatctattatttgtttaactacagttagatgactctgagtcctgtatagaccttaactaaatatttatctaattagagaccttggcttttaaagaaataaattggactaaaatatacatgatttttgtctatatttttattaaaataaatattagcagaaaccattctaaaatccatcttatttgaaaggaaaatcctgtcttcagttttaaaacaaatagttttagatttttcttcatcactaagaacttattactcaatggcacattaaacttttcagttttgctaaatattacttacatttcaaaactaatctattttctatgttttctataaaaatagaatgtagttacattatagaaaatagattccatttctatggaataatgatctgtgtaacaaagaggacactttcttcacttttaaaatgtattaagccaggtagttaattcgcgtagccctatgactaacataaggcagagaagggcaaattcaggtacacaattctagttctaaatgaacatagacaaggaactagttgggaaatttggaaggtttgcatagattattacttttataggtcataagggaagaactgtctgtacaatgattccagtagatgataaatgcagaatgagaaattgagctcactttatttataagataaatattcagattaagtaacatgccctaaattgtacaattaccaggtggtgaaaccaagatttgtacttaatcattctgtgtcagaccccatgatattaactacttattataacagttcaagtagggaatttatgcctaggaatttagacttgattcaattaactttgttgatgattgggcattgctgaaggtttttgagcaatgaatacactgacataaacatacacccaaaaaacggaagtgaacagcacattaggttaatgcattacctgatatttttgtctcatatttaacatttttttttttgctgcattgtaggagtttctcatactgtgttttcttttaaaaatctagtttgaagaaaactttctcttataccagggtataaacagggtgcacttagcctttcatagatttaagatggataaaatgatttcttgtgctcctctcatatatactggaaaaaaatgaagtatatgatcttattgtatttaagccagatgaagtccatgttttctagatatatcagatttaattcagatggcatgaaaaggtctgcatatggactctcacagtctatttccatggattctgctaacattgacttaacattgaccagttaataaatattaaaagttcccaacttgaactgttatagtaagtggttaatatcatggggtctgacacagaatgattaagtacaaatcttggtttcaccacctggtaattgtacaatttagggcatgttacttaatctgaatctttatttatcttataaaatgtagcaagtaataccacatatttcatagggtggttgtgaggcttgagtttgacaagacaagcacaatgcctgtaacttcaaagtcctcagtagctattataattatcttagcattttagagtttccagttttaaataattctattttcatgtcaagattatttctctggtaataaattacctgattttggattctgggtctcataagtattaatttgtctactggtagttcattacacatgctttaagctatttatctgtagtcctagcacatttctgcattttattttcacatctaagagaagtcagagtttcctgcatcttcttcctctctagtaacttattgctacatgattttacctttctttacctctccagtaacattattttcctttgctgtatgatatggtataagaggaactggtttagaaataggagtcaggagataaataagcttgatagtgtttgatcttcattacccatgaacaattctaatcctctcaaacccttagtttccttatctgttaagagaaaagggtggacgacatcagcgtcttcaaatcttttcactataaaggatctcatttattatttcactccatactcaccctcaactctgcctttataatcctagacttcaacaattcaggttagcaagacaaaatctaatccttaaaagctgcaaggccatgctataacacaataattaatggtcaaaaatcaattttatgaaatatgagattgttctatttttagattaataaaaaatagttttaagtcagtttatgctgtcacacaaatcacaccaaaagaagataggataccttttattgtgtacaactaagttccacgtcattctgtgcccctctccacaccagatgataactttagcctgccctccttggtaactagggctaggcagagcacaggagtaaattgacaatcctattgtagtggaattagttatagtaggtcaggtcatttaaccaatgtgcaataaccaaggtaaccagtctttcacatggagctgatgacattccattcagatgtaacaaagcctaatatgttgataagcctaacctgacttactgtggatacatagaccatttctgtttgattctgaattaaaacgtaattatttatttcccaatgctatttggacggacatcaacaaggctcaggattccaagctgaacctttaaaaacttggggactgattacatttttctagtcatgtctatcattctaaaattagtgatctccccctcagcaaatcaaccagtttttttttctatttttattgttgaccttgagtgatgttagatatggattatattatattctcttagctactattccctgaaaagttactatttcctgtaagttcaaaagcaaaaacaatgtatttgagattgtcctccacgtaaaggaatgaatatgtcttggaaaggagagaacctgttttttcccaagagtctcatgaggccaaaatatggtcatttctgcatttacttatgaatgtgatatttaacagccctaggtgggtcatcttaagggtcaggcaatcatccgtgactctcacatgaacaagaaaacctccctgagggtgtgtaggatccagacttataacccatgaagcaaaagtcacaaaaaaatagtgaaaagacctgtagagcttgcttccttctttggcctcatttgccatctatttattcctggaacataaaaaaagacaaatttagtcataaattataggcacacctttattgattcaacactgacaaaatgggaaatagtccaaatgctttggttcattatcaaacaacaagagccaaaatcacaaacccattgcttttctggaaagtttttaatgctgctttatgcatgtatctatacatcatgaagatttttggattctccaaactaactttgacacatcataatggcaacatttgttttctgggattctactgtcagctgcaaaattaaaaaaaaaatctaaaaataaaaaaaaatcacttccttcagacttgctacaaaatgaatctgatagacttaaaatttgctgtgagacacaaggggtagaagccatacgccagtgataagaatagatgatttcctttcttccgccagactctaactagaaatagcaatatgtatgtgtacatagagaaagaaagaggaaatatgaacagatgtaggaatatttacagagagggaatgtcatttttagtactgaattggtgtaaatgaggaaggaaaataatagaatcctagagtggtgaataatagctccggagaaatggcttctttctccctccatgtccaaaagctccttggcttacagccagatggaagttttcatttttttattaaataaattctggttcccgtgatcagtttggattaggctggtttttcaataaagaatattctaaacacagagttagaaggagtttcatggaatttttcactcagagcacatagtagagtacctactggtgtttgaaggctcacggtacctgctgaatattctaaaacagaactagatgcgggatggctaagcagccagcaggtgaacagtaggttagcttgaaattgaggatgcagacagagcaaactagctctctgaagttaaattaatttgtaactcttatgcctgggaagaaatcaaagaaaataccccacagtagcctgcagtgccctttcatttccatttggaaatgtgtttgatattccatggaggcaggaatttaataaagaaaaccgaggagtacacaatgaggaaaaaaggcttttgcattcagaaagcataaaaattaaaagcaactactggttattttgaggaagacagttattaagttgtgaaaactggtatttttttcttgccaacgcagatgtcaacagtccataatttaatttctctgtgtctcagttattctttagattcagtgccgtaaatttcatgttgaggttcctaaataactgtttagggaaatggccctgttaaaggaaagccgtagtcatcactgcattagcataaattcttgtttactcaggatacatttgatcacatccagtgtcctaaaataattgtaaggagtgtttagggtcccaggttggataatttatatgaccaacctagtcatctaccatgagggaagataaaatagtgtggccccaaagacatttgggaaaatctgtgaatatggacagtgaatatgcccctcagtaggtcacacacactcaattaatttgaccattgtaatgttttaaccttttttaaaacaattctttaaaaaggaaatattctcttcctttaatacatcttcccttctttagggcatggggcctgatgatagttgactttttgtttctgaatatattaagtgtaaataaatgtgtcaggttatatgatccatgatgctatttgacttttaacaaattattgctgaaatatagtaattgaacatatttaattttgcactatcttctcaaaggcaaaataagaggggcaagagaggcagaaaagaggaaggaaggaaaaggggactgaaagagggaaaaagaagaaatatatttatcaatttctatttgagagatacaaaaccatttctatgttgaaggaaaatgggcttcttgagtatttcagaaacatgattaattttatgagactgtgtctgcatttgttctcaaagtatggtagatacctagaactttggaatttcttgagatgctttcaggggatctgcgaggtcaaagatttattttaataataatatatatcttttgagttttttaccatgttggcttaagaatgtccatgaaaaagcagtgaaaattattaattttattgtctcgatccttaaagtacacatctttttagtattccacatgtgtcaacataggaaaatacatacgcaaaaataaaagtataatgggttttgcatggtaaacacttctgaggtcatttgtgtttcaagctgaattagctacctttttttttttttcttcatgaaacaccatttttacttgaaaggacagtcaatagaaaaacttgctgttcacacttggatacttgttacacatttctcaaaaatgaacaaagtgagccagctacttcaaggaaaataatatttacttccaagaatgaaattcaagtttttaagttagaaatttgcaaaacatgtatctgccactgggagcttgacagcttcccaacattcaagcacctttctgatgggattggtggtgagagtagcaaatgagactttttgctaatctataaatgtttcaacatttggaagatgtgtctaatacaatgtaccaatccaaataaccagtgattgatgtgacagaatcatgcatgggtaaaagatctattcaaaataccagctagatcagtagatttttacataacatagcacaaaacgtttataaatatggtgctagatttcacattacaactaattttcaaaaccctgcttattgagttttgctgaagtgttcaaggatatctctacaattatgtgaaaaggctatcaaagtacacctcccttttccaactacatgtttgtttgagatcagattgtttctatgtaattcgaccaaaacaacataacagaacaatgtcaatgcagaaagtatttttaaattaaaccaataatttttaagatttataaaaatggaaagaactaccactatactcaataataattttgttttggccgacataggtgtttttttaaaaatattatttttgatggggtaaaaataaatatttaatagactgggcacagtggctcatgcccataatcccagcaacttgggaggctgagacaggcagattgcttgagctcaagagtttgagaccagcctgggcagtctggtgaaaccccgtctcaaaaaaaaaaaaaaagaaaacaaaaaaaaaaaaacaagaaaaaaataaaaaatattggctggacgtagtgacatgtgcctgtagtcccagctatttgggaggctgaggtggaagatggcttgagccagggaggtggaggttgcagtgagctgagatcatgccactgcaacccagcctgggcaacagagcgagacagactctgtttcaaaaagaatcaatatttaatgaacaaatattttaaaaatctgttttgatttttagtatggaatgtatttgttgctatatcctgtataatcaaaagctaaagagcttcaaggggatattcaataattttcaaaagcacaaaagttcctgagacccaacagtttgggattcactgtctgcatcgttattctttgttgtaatgattgtagactggtcatcctcaactcaggtaacagattaagctaaagtaggtcaatatttctatttagaaaaaagtgaagaggaaagagagaaaggaaaggatagcaaaggcaacgtattgccatagggtggttccacattttaaggcaccctgtgtagcctgagatcagtatcactgtaatgactgttttctctttatttccataccaccctcttgctgtctgggaggattatctgtactgccaccaggataacaaacagaccagttcaaagaatcaggttaacattttctccccaatagggaaatgctaaactaggcttgagttcaagtaaagcattactgcttttaatcgatttagaaaaatagttacataactttgtacatttacattcatgagcatcacattaaagaggtatgcttttgtagattttaataccaaaatttgacattagaaaaaaatccattttttctgctggcttgaataaaactattgtcaaatatgttttctaggacccacgcttatatttttctctcagttttattttaaaatatgccatagatacatataagtacatgaaatatatgtatatcttagagaataaaatggaaaatgaccatgtatgtgtcaaccaatttatgaaatagaacattacaaatttgcattctgataccctctcctgtaattgaactatgttcattaatttactggaaaagtctttatattctattagctgaataattgcatttggatatgaatagtggtgcccatataacgagaacacaaatgatttttaatcagtaattactaatttcatcatggttccattaaaatcaatttagtcaacaagactcacaacctagaattttaagttcacatctcccagggccttttaatctattcttaccgagcttagaggaaaaattttcctttgctcttaaatatgtgcctcgaatgttagtcattaacttttataattgtttgctcctggtacaatttctacacactttgcaatactagagtttaagataactctgtactctaagaatactacatgttattttaaaacctttagaaaatacgcaagaatccaaagatgaaaaaaccacccataattccatcacacaacattaaccttgaaaattgcatctttatcctcctcatttaaaaatataaatatactttcttaatcctcctctctaaaactcatattgtaaataaaggagaaaaataaggcagatatctagtttaataatatttctgtagaacatttcagcagtgcaaaaacaaactaaaaatcaaactgaaataacaaagttatttggtattttaagtttctgagatcttggtttcatttttatgtatatatttcagttattttttgcagcataataaactaaaaaatttaatgactcaaaacagtaatgatttatgatttcttatgattctatagtttatatgaacagtttctctgctggttacacttggcctcacttatgtgcatttggctgagagagaggtttcaagatggcctcactcacatgcccgacagctagtgctggctgttgactgagtgcctcagttattctccacgtgactttctgtcttccatttggctagacttacatggtagtgtcagagacagcaatggcaaaagctgtaaggccttttgagaccgtggctgcagagctcatgcagcgtgactttcaccataatctaccagtcaaagcaagatacaaggccaggccttatttacaacaagagtaaaaggcatcccttttggattagagaatattaaaaaattttttgatcattaatctagcacaaagttgtaaaatgtatgaactacttactattaatgaaaaattgtgttccttttgggggaactttcttactatttgaacttatcaaatgatataaagaaataccaaacttattggggaaataagatcatgtttttctggcaaaagctgacattttcatatgaatgtatgtacaaattccaatgcctatgaagctacgatggtaacaaacatcactgaaatgagccaagtcaagattggagtaatctggaccatatatgctctatctgaaaatggaaaagtcgatggttcttttttttttggctgaataagtccagtgatgcctggaccactgatattttaaaacaaagattaaacattggtaagtaattttgttaaacaacatgaatctaaaagttacatggaaagacaagagacccagaatagagagcacaatactgaataagaagaacaaagtcaaaggatggacaccacctgacttcaagacttactataaagttacaacagtcaagatagtgtggtattggcaaaataatagatcaatggaacagaggagagctccctaaaatagacccagacaaatacagtcaactgatctttgagcaaaatcaagtcagtggagaaaaaagtcgccttttcaacaagtggtactggaacaatagaatgtccatatacaaaaaaaaaaaaaaaaaagaatccagacatacctttcacaaagattaactcaaaatggaccgtaaacctaaattcaaacacaaaattatgaaacttctagaggataatgtaggaaaaaatataggtaagcaaatttggcaatgcatttctaggtataacgtctaaataatcatgaaaggagaagttgataagttggactttattaaaattaaaaacttatcttctacaaaagatacttttaaaagagtaaaaaacaacccacagattgaaaaaaaatttgcaaaacacacttgtgatcaagggcttcaatccgaaacacacaacaaattattaaaaggaaagaaataaatttaaaaatagataaaagatctgaacagacacctcaccaaggaatatataaaaatggagagtaaacataagaatatgtttaacatatgtcattaggcaattgcaacttaaaacatctattatataccattacacgtgtattagaatggctaaaatacaaaaaaaataatggcaatagcaaatgctgacaaggatgtagaactttttttgctggtggcaatgaaaaattgtacagccacttcagaggacagtttggcagtttctcacaaagctaaacagttttaccatacaatctagctattgcactccaatatatttaattgagttgaaaatttatgtcctgataaaaatgtatgcttgaatgtttatagcagatttgtttataatcaccaaaaactggaagccaccaaggtattcttcaatagacgaatggataaactggtacatctagacaatggattattacccagcaataaaaataagtaacctatcaagccatgaaaatgcatgaaggaatcttaaatgtatattgctgtgagaaaaaagccagtctgaaaaggctatgtactttatgattctagtgatatgacatcctggaaaaggtacaactatagaaatagtaaaatgatcagtggttgcctggagtttggtagggatggcaggagtgtaatgaataggtgaagctcagggatttttaggatgctgagattattccaaatgatatggtaatacatatatatgacatgcatttgtcaaacccataggattatgaaaagtaaagggtaaataatgtcagctatggacttcagttaatgataatgtatcaatattggttcatgaattaaaacaactataccacattagtgtaagatgtttgtaataggagaaactgcattgcaagggatggggacctgatatatgaggatactctgaactatctatctgttcaactgttttgtaaataaaaaattttaaataaaatattaaataaccattttgtgttgcatgattttgttttctgataaaataaaatagtttgagtggaaaacctcagctgggcttggtggctcacgcctgtaatcccagcactttgggaggcttaggtgggcagatcacctgagatgaggagttcgagaccagcctggccaacatggtgaaactccatctctactaaaaataccaaaatgagccaggtgtggtggtacatgactgtaatcccagctatttgagaggctgaggcaggagaatccgttgaacccaggaggtggaggttgcagtgagctgagatggcgccactgcactccagcctgggtgacagagaggctccatctcaaaaataaaaataataataataataataatatatataaataaaaggaaaaagtgtcccttccatgggtaaattagtagcatcgttgataggtcctaggtaatttttttttcttttttagctagaagattaagtagatcttgatgtttttcacaggggatattgtagaacggtattgtatagtgtaagttgtagaaacatttctaccgaggagcagatggtaaaagtaaaatattcaaatgcataggcctctaatatcaaggcaactatttgtaaatatatattttgggaactttcgtgttcaggaaatttattattaagcagtattgtctttcaaaccatatttgcgagatttgaaaagtcactttgaagaaaggaaatgaagcataccatcagcaattttcaaaagttctgagacatttttctacagtattgatataataaagatgaacacatttggaaaatgttctcaatattttcattgtgaagagtatttatttttgttgctggaacaaccagaagcaaatgtgggaagactgagaaagtgtgaaattttatttctccacgcaaagaatactttagataacaattactgtctcaactactagcttgagaactggtgtcctttttattacactgtgatatacctgtgtggagttgggtcaggctaatgaagactaaagataatgtcaaatatgtcctatgtcccctcccactttatattctctttgaccaccagcagctcatgctatgacccgattgggtctgtcctcactcagcgattctcctcaccccgatcctagtttaaaagatttcattgcctcattttctttgcatccagattttgctttgagtctgcaaaatgacagattattggctaatcccactgaatgaatttggttgaagatgacttcaattaagtcttcctcaggagatgtggattttcatgggtacttgaaaacacagcatcttgtctcaaataaactttgagtgacataattttagtcaacaggtctggtcagaggatgttgccatgggtagaacaccctcctccaaggactggttttggtgtgtccccaggcattatcagtagagcttatataggaaggtaaatagaagctcttaactgtccgcaagcctacttgagcattgcatttggggcttagaactttgtgaattttttgcttattccacctgatataatcttagcaactttggatgaaatgcatttaaggattgaatcaaaagacttcctaagtcgcataaagactgtttcagttatctgctagtaaaagtgaatagtgttccatatatagaactagtaaatgcatcagatgaagtagaaggatgcagagaccttcactgacccagggtttcagctctaggggcaaactcactctttgaaatgttgttaaaattaaaaataaaaagccagacacagactagttataaaataaaccaacttcagttatataaatctgacttccttttctaagaaagcagttattttctcagcacctgtgtattctactcttcagtacctgtacgctatttaatacaatttgaatatgtcaaattctaatatatttgtttctcttattttccaagccacagaagcaataaacaatgtagaagaaagtagaatagatattggtggtaggcaaactgaacatatcaataagttttggacaataacatttagaaaagctattgacatttttctgttctctaatgctgataagtaaacaattcctgcttacttatgggtagcctcagatacatgaatagcctcaagctgatgccctataccatgatgtcatcaacagctaagaatatttcaatatcataatcctatacacttgggatgaaaaaaactattttaggagtttacaaatttcattggcatcttttcatttttctttccatcttttgttaggaaaaaaatcaaaatatatcatttatctttgcaatgtttttcatatatcatatgatactgtgttttcccctcatagatccaggactgcatagacagctgtattttctgcaaagaccatccaatgtagtagccattgaaggaaaagatgctgtcctggaatgttgtgtttctggctatcctccaccaagttttacctggttacgaggcgaggaagtcatccaactcaggtatttcacatttaagacttttttgtaaagtgtacttttgtatggtatatgctgctatttatatttctctaatttgatataagtacctacagtactagggtttttcataataattgaatatttttccacatttcttggcatgatacagttatatgaaagatatttagccactgggatgagaagatgaggaaaagatcaaaatccatgggatcaattctgaaaggaaactgaggaagtcagggctgcctttgagatggtcctgtccaaagagtcttcagcagagaaattttggtggattccattataagaaagtggtatatagagaggtttgatccttaatattctgtgtcacacacaaaagataactatgtgaagtgatatgatcatcagttcaactgtgataatcatttcacaatgtatacatataccaaaacattacagtctacactgttattatatgcaatttttgtcaactgtacttcaataaagctaaggggaaaaatgaaactaaatttttctgaattcaaatatgtagcatgtcattatagagtttgagcaattttttttagcttcaactatatcgctcatattcccagctataacaaatatttaagggaagacagaataacttggctggctttgaattgctggaatattaatattaagatacagttagaaaataaactctcaatagaatggaatacttagtctttctgatgaaatggatcttacttaatttcattgatttttgaggactggtattctcctttttaacatatttatttttatagagaaggtaagtccatcaatcataaattaatctttaaatttcatttaccttaaatatttagataacaacaaggcatggcatatgatattacagtatttttgagaacattagaacacacaagaaatccagttaccatttcagcacatcaaggtgtgttctctgcgtatagccaagcactcttagtgcagtatcaaatatggttttgtacaaaggttactaaattggatttcaggacacaggacattgattttcacttcagagtaccacttctctagacctcgaggttctcaaatccaaaatgagagatttggactagattatctatcattttttttttagcactaaagttacttccaagtttaatctgcttcatttatttgatcgctacacacaatcttccaatgggagtagtttaccttgagtgaatttttggatcaataagtgagactttaatcaagcccttatgatacacagtttctttcaagtgtcttaatttgagctttggtggaggtcatttaaagctctgagtatcttgcttaatatatacatatgttaatttactctgcaccttccctatgtcttgcaggtctaaaaagtattctttattgggtggaagcaacttgcttatctccaatgtgacagatgatgacagtggaatgtatacctgtgttgtcacatataaaaatgagaatattagtgcctctgcagagctcacagtcttgggtaagttagtggctggagatgagtttatattgtacctttcaaagtatatcaccgcgacattttaatgctcatcactgaattgattcctatgtttattagtgtgaaattgcaaagtcccaatactccacacatgtccttgctttgctctgattaattgcataggggttatatgcaatgtttgaatacttattaattaaaatccagatatattatgctttagtctaattattccagtgatacagctgaaaagtaccaaaaattattaatggcagatgtgttgaataataaatatgatattacaaaatatctgggaaaataaatgaaggaaaattgtacaaaatatttatccttgaggggaaaaaggcagatgttatttgagatgacagggtttctgacattaaattcagtatgttggtaagatttttttattaacatgggaatactgtgagtgttgaaagtgaaccattaaaataaagtatatgtaaggaaaagttgcatagcaagaatataatttaaagagatttaaggaggattgaggggttcattatattccaaaaggcagggttacccatgtgtcattgcaaacaaataattcttctacatggcagttattcaaacaaacacatatttttatcacttactccagatttattttaaccagttttatttgaattatgtagtttggagaaagtgccttaacatttggatttcagttgctttttttctgtaacaacaaccaaacattgaatcttaggaatttttcctctggaataaatctttttgccttttaaagaatctcagaaaaatcatagtctatttaaaagttattaagtaaaaatgaaaatatatcatatgctgattatatttgctaagttataccatgatattattccatccattttgctttttgtcttcaaaggttattcagaaaacactttcatctgtggacatggtaataatgtatatcatgggttagataatgacgttgcttgttctttgatcaaatcataaacattaaaccaggaatgggcaaaagacttaaaccctggatttagaggtagtattatactaactaaaatattagctgcctttaaaatggcacagtttaattgagtcatatttcatattttggtgaaacaaagaatagagaactttcacatttgtagtatcaaaattcagtaacacaaaatggttatgatggaaattgtattgtgctgtatattactgattataaggcagatttggttatggaatacgctagaatttacactggtcataggtaaaccattacttgcatgaggtcaaattttatttcaaattaatgcacattattttgacatgtaatggttcgttgatatctgagataaacatatgcaaatactgatttctggggataaactaaattagtctctatatatatacacacacacatatacatatgtgtgtgtatatatacatatacatacacacacacacatatacgtgtgtgtgtatatatacatatacatatatacacacacatacatatgtgtgtatatatacgtatacatatatacacacatatatatgtatatataaacgtatatgatatatacactatatatggatatatatacatatatatggatatatattttgtaatttacacaattcacaaagaaaaaatgccagtatgagtatgccaatacatatatatacacatatatacacacatatatgtgtatatacacgtatatacgtgtatatacacgtatatacgtgtatatacacgtatatacgtgtatatatgtgtatatatacgtatatatgtgtatatatgtgtatatatacgtatatataggtgtatatgtacatatacacatatatgcacatatatacttatatgtacatatacacatatatgcacatatatacttatatgtgtgtatatatgtattggcatactcatactggcattttttctttgtgaattgtgtaaattacaaaatagatgctgtttgatacatataaaactatccaaagatgcacaagaaaatatttaataattatttccactacaggcagtgcatttctatacctctgaagtgaatacttttggtatcttggcatgttttattccataaacttctcatatttcattgatgcacatatgcccacataaagtttggtagtggtatgacacttggatgcttctttgatttttccttaggccagatgattagtctctattacaatacctctagtgaaccttgactagtgttattatgtaaaaaatattgaaaataagcatccaaaaaatgctccacattactaatcattagagaaatgtaaatgaaaaccacaatgagaaccaccatctcacaccagtcagaatgtctattactaaaaggtcaaaaaataacagatattgccggggttgtggagaaaagagaaagagaatgtttatacactgcttgtgggaatgtgacttagttcagccattgtggaaagcagtgtggtgattcctcaaataacttaaagtagaattactatttgacccaacaatcctgttattaggtatatactcaacggaatgtaaatcattctaccataaagatacatacatgcgtatgttcattgcagaactattcacaatagtaaaggtatggaatcaacctaaatgccaatcagtggtagactgaataaagaaaatatggtaaatatacaccatggaatactatgcagccagataaataacaagatcatggcctttgctgcaacatggatggagccattatcttaagtaaactaatacaggagcagatcaaatatggcattttcctatttataagtggaagctaaacattgagtacacatggacacaaagatgcaaagtgtgtccttatgtacttgatgtttagtttccaatgtgggacactggggcctactgagagtggagggtgggagaaggaagagaaccaaaaaactatcgagcactatgcttattacctggatgacaaaataatctgtacaccaagccccagtgagatgcaacttatctatataacaaacctgtacttgtacccctgaatctaaaataaaagtttaaaaaattgacaacataaattaacgtaatataatacagttaatatgcattagtaatttaatctatgtgtacacatgtatgtaaaacatgtacatatgcacacatgtgcgtgcatatttatatgtgtatatatgtacatatatgtggatagatatacacatagatatattagaaacagcatttactgagttcaaaccatgtgagacatttatttgttacagtatcctctgtgggaagtacgtaggtcgagcccattagataacaaccctcttgccttctgtgcttctgtaccaagtgagaaacaagaacagcagtaaggcatagggtaagtcaaacatcaccttaatttgttgaagaagctgccgttgaccatggtttgcatctgcatgggaggcacatgcccatctggacatgggcagtgtctatattggcaggatgtcactcaggtgtcagcttgtcccactgcttggtggctggtggcaatggagagcacttgctctctttggtcaggcctgttcccaagagagaattgtaggtgaaaggagtctcttcaaacttccaggctcattaagttatctgtcatgtatcctgatccaggctcccctcaaaccaagaaaaagtgggtactggggagtggtgaggtcagaagtcattccctcgaggagctgcctctctagggaagaaaatatcagtattgaggcagaagtattcaacatccacaccccaaccttaggtgttacttttaatcccgttttacaaacgaaggcattttagcacagaaagataagtggctatcccaaggggggatccagatccaaatccaggcatccgaccaaagagtcttaggcatatgctttactgtctgccctgtctgctccacacattcctattcatcgttttttattatttatttttaatcttactgaaacagctataaaaaaaagcaggtttatgtgatgtaaataagaacaattttaaattttagtttggttaataattagtcacttacataaaataaaatacgtgaccgtaatgtaatgatcttgacaaagcagaaaggctgacaggggagcagggaagaaaggaatacaagctgttctttgaaaatgaggttaaaacaactgccatacttcgaatctgtagacacagaggcaggtgaaaagtgtactcaatatcgggtattgcttattttttttactgtaacttcttgtttattcaaagtggtgtgccgtttgtataatcagaaaaataaatgtggaggtataaaagttgacatgtttatggtttaaaaatgagataaataaaaatgttaaaactcagaaaatattgagattatgctaacatacacataatccaaagacctggactttgcaaacacacacacacacacacacacacacacacacacacacacacactcacgtttgttttctccatataagtgaaatgtatgctatattgtatcctcattttcacttcaggataaatcatggcatctttctttgtgtgtgcctgtgcacatgtctatcttctccagttctaatttttttttctttttgagacagggtcttgctctgttgtggccttgagttcgtggtgtcagatgatcctccattctcagcctcccaagtatcttggaccaaatttggctatttattttttctttcttttctttttcttttctttttttcttcttttttgtagagacagggtctggttatattgcccaggctgatctcaaactcctgggctgaagtgatcctgccaccttggcctcccaaggttctgggattacaggcatgagccatcgcacccaaccttcagctttatattgtggaacattatcatgtttcttagttttaattaagcgaggtgtggtggcttgcacctgtagtcccagctactcaggaatctgaaggaaaggatcttttgagcctaggagctctagtccatcctggggaacatagcaagatcctgtatctacaaaaacaaaaacaacccactaagttaattatccttaagtatctttgtcatttatttgctcatatctgaaggaaaagtatcccagaaatacttaaaccctcactggcagagcaaaactttgcctcccttcagagtgcattttcccccacaattttgaatatctaaacattttataaaatggagtctccttgtaagtatttatattcctattaaattaagatttcattttatagttttcttggacatttgcattttacattttgtgaatttgctgtcttttttgaccttcatacatttattgaaacatttatccttattttattgattacagaaactctttatgtaagaataatattgactatgttgtgtatgcctttgcatttttacattttgcatatggcaccaaatctttttcttcatggttgctagcattgtcattagacttacatttttattctatgaaccatgctatctctaaaaatctggttatggattacatgttgaatgtttaaattagaagcatgattaatttctaaaaaatagtgatatgtttatattttgagttttcatggtcttggttctttttgtctgtttttaagggatttttttggtaattggacatattttaaaggtctctcatggactttatatcatttataactactctagaaggcataatttacttcaggatttggttgatatgctgttttaattattctaaaaggctccaaaaatgaatatttgtataatgtttgaaataatctttgactactctgatataaagttaggattatcctgcaggactgagtttatatgaaaaattgaatttattgccttcttaaaatggatgataagaaaagaactttattatcaatgttatttaaatttacttttcataatttttaagaatttaatcatatttgtattcttcataagataaaatcccacaagaaatccaagcttctgcttataaaactttaatcacgcattttattagactcttgttttgcctttcaacttgcagtcctttcttgtacttaactgtctgtgaatgtgaaccttcatgaactaacagacttttcaagtagaatatcattttatagactagaagaaaagacattttgttgccctcctcagtaattttacagagtgaatatacattaaatataatttgaagcttagcattttgtttccttcttataaaataaaaatggaaaattccataatcattaagctttttggagatatctttattagacaagattaatgacaaccttatttacaataaataaaatataaataagttcataggtattttctttatcatagccatttatggtagcatttctgacttacagtaatcatcgataaagtattggtggacaccttttgggtacaaggattgcactaggttctgggaagactacagaaacatctgaaacctggcttcagtgggcttcgtataattacaattcgtaaaatcagttggcctaatactgtctgaataaacttttatttaaaaaaagaaaaaacgaaaatgttatatgtaaacagggactctgggaagatatgaagagttggtagtctccactctcatagaaaacaaagcccgaagaggcaggggtgggaggagtcctaaagaagaaaatgtggaaggaggctcttggaatattgttgtcaactttttaatttaattttagccatgactacttgtattatttattttaaaacctaacttttataaaagaagtcaaaagtggtatttttccattcttatgttcaatacgtccagctttctggctcaaggattttaatctgactataattgtgaacatatccttttctgtatctgcccatccccaacttttacccagctccacacaggaagaaagacagtcctccataaatgttctagagatttgccactgctttgggtctagattgatcccatgtctgaatcagtgcagaaatgcataatttaaaaagtgatttgatcttttacaaagtgccaggctttggacaaaccttgtgtactgtccttacacacacaggtggagatgagtgggaactttactgaggatggtctcttcagtaggagccattaagttgaacatcagtgagaaaataaaaatatctttgaactttccagaaatggttctagaattccctttaaagcagttgtgtagcaacacaaaaaacttgtaattgccctctaggaatgtgttaagtagagttctctctatagagctgagcatgtccaccttacacagatgtgttcaataagcctgaagatgatagactcagaatatttatatatagatatagatatacatacacacgtatatttttgtatatgtgcatacatatacataaacatagtatatacatatatatgcaatacatgcacttactctctatttctaaagtttccctttaaacttattattttctttcaaatgcatatgattatctcaaccattaaatgaggttctgattctgcaaatagataatagactaagctattcagaaaggtctagaaaaatcatcttaaaagtgatttaagaagaggccaaataaagatatatgggtgaagttaaatacccctgttaaacattattgttttgtaagatagctggaaaagttcaccttaatagctcattgctcaaaatgctttggaaattttgaaacatatggctggatatacggtgagctaatgaatatagtttctagtcctagatatgcagctgaaccacagtgtgagtagaaaactagcaaccaactgttgagtgcctcttgtgtactaagcattccgccaagtagtctttgggcataagaagatatgacacagatccaagcctcaaggataggtagggaaaaagacaagaagcaggcaattgctaacaaggccgaagagctgttgagaaagaggaagacaagggaccctgaataaagaatgcaacaaagatgagagaatgggggagggagtggtgaggggagagtatgagaatgggggagggagtgttgaggggagagtatctgacaggaggtagtaaatgtgcaaaggtctggaaataagcgggatggggaacgggaagtgaattatgtgactaaagattgtgggtacaaaggaatctgatgctggatgggagaatccatataggtcttgagtattttgctcatgtggttagatttatcttaagggcagtggaaacatatggaaagatttctgattgtggcttgtgagctatttaattttagccagctatgtaaacctctaatcttcaattccttcattattttcttcatatttgtagagctttaggagctacaagtgcagttttgttacctggatatttcccatcatggtgaagtctgggcttttagtataacatcacctggatagtgtacatcgcacctattaagtaatttcttattcgtttgtaaaacaatgataattactttatcataggatttggtgtccgtttgagtgtgaaaagtagaggagagagattccagaataatcaggcacagctttgggtgttctgggaaataaagtaatataagatcccctcctagccttcatgagaagcctaaagccagttggaaagattaagctagctaaacaaaccaagacatcccaaatgtcacaaatattaaaatattctatgtactttttcatatccaattatcattatctataaaatgtacataacagcaactagtccctacgtagttctcatgaattatggcgcgattgatataacaatatctagtgatcaatataacagtatctagtgatcaatataacaatatctagtgatcaatataacaatatctagtgatacattgaaatttctttggcagtaatctctagaaacatagacatccctctgtgggaaaaagatgatgtccatttgtgatgtgttttatgtatttcacttttttctgtgcttctacaccttgctgttcatgctttcttcacagctagatagggagaaacttaaaaacagaagccatgtcttctacattttgatcactcaaacccttagatttttatctatgttatctgagttttaagcataagaaatgcaattgaatgtgcataaaatataaattatctaacttcctatcgaaatgttttgtaagctttccattgagattcatgattttttcattgaccactgcaatggacagaattatgtcctttcgaaattcatatgttgaaatcctaacccccaatgtgactgtatttggagaaaggcctttctttaaatgagtaactaaaattaaatgatgtcataatgaggggatgcctatccaataggaataatgcccttttaagaagaagagttactggagcactctctccacccttgcacagagagaaaaggccatgtgagaacagagaaggtgttgtctggaagccagggagaggacccttactagaagccaactttgctggtaccttgatcttgaacttcctaatctccagagctataagaaagtacatttgtgtgtctaagccacccagtctgttgtattttgttatggcagtctaagaagactaacacaactacagaaaaggtagatgctgtatgcgttacagaacaatcactaaaaatagaacaactgctaaaaagattctttggtcttttttatcaaaagtgagcaacaatgaagacttatattatcaacattgcttacatattggtagcacaaataatcttagatttctaggagtgtaaaaaattcccatttacaatagcagtggatcaaaaataattgctcatttacataataggtcttgtgtagttcttagatccttataaatttgatgtcctttcatcttatttttgttcgctatcatccctttatttaataattactaagtgtaaggtatgatatatattttaggtcttatatttataaatgacctatatcaatttaatagtaaatatatcattaactgtgatgaaattgtattcttttttaaatcaattctcagatatgctctatgaattcaatttactacaaacaagcatgtatatcttcacacaccatcaattcagatttgtttggaaatggaagaaaacatatacttcaaaattgatatggcttttttccttttattttttgcataggctttaattttattttttacggaacaatatgtgatattagctgctattttttgagcatgtattattggccaaattttacctatccatttgcttgaggttagtggttcatctacctcagacttgggtgttcagtctcttcctacttcagcttgctggtagatcaaccatgttgagttttaggtttaggctctttgccataaatgggaagtagttataataaaatatgttaagataatatttatctttttattgcaatgtgtaattcttattttgaatggagttcttttgaatttacaacatcattgcctctgcctacgtagcagtccttaaattttacatatatctgtaattgcccttattaacaggactcctcagtcatatacatttaatgataatagtcataaaagaagtgccttaggtacgtttgtattgattatcctctacaatgtaattaccaaatgaatcatactgaaatgagttaagagagtttttgtatgtagggttttgatcctaaatgtaggatacaggtgtgtaatataaggcagaattaaatcaagaaaactattaaatcccacctattaggtgcttcttcccattgctatgcagattacttatcttagttattttcctcagctgaaactctggttgtcaaaaggtatgcaaaattaagtgcaaaatatgtttaaaagattctgttgaatatttatatgaattagaagaagagacaatgtaagttcagactgtttgttggtagcaaaatgattcgttatttcagttgggagttagaactggtaatggaaatacaagttggattggtggtaggataggtttatttattacacaaatatttatttgagagtctactgtgtgctgggccctccctttcctttctcccttccactggagaaaataatgtgagcattgctttgcatatattattgagatgatgatgagtctaattttttctttcttggacaaatgaagtagaggcccccgagggaaaagcaaagtctatgtactaatacagaccattaaaaaggcaatctaagaatataattttaattatccctaacaatctaagcaaggtgaattgacaatctgtggctcacaaggaggagaactgctgacagtggtggaaagctgcccaagagggcattttatgctaaagttgccctgaagaaacggaagtagacatcatcccagaaggagtttgactctgtgataagactcaaaccacattagacagaaatgttttaaacaaagtcagcaagagttaggatcagttatggttgccaattttcaaagactagggagcaatatatgccatttcttcatacgcttttaaataaatgtttttctgattttttattcaatatatcttggtgcaatcatttcagtaactttatgtagtaaggtatggactcatttttattttaagtatagtgtatttgagcagggaatcaccaaaggagtagaattgctggattaccaaacaatgcttggtaatttgaggaactaccagatggtgttttaaaccagtgacacaatttcacattccacccgtggtatatgagtgtttatatttctctgaggttacagtgagtcattatgtatatatgtgcaggcaggtagaatgcaaagagggagatttttcttatttttaaaacaataaaataatatatgacattcttgactcagaagaagatagcagtgaatgagtttttcttcttcctattaggttggtgcaaaagtaattgtggtttttgcccttaaaagcaatggcaaaaacacaattatttttgtaccaacctactacctcctcattcccttccatgtaaatggaggaacaattcagttcccattttccactgtaagcctttttgtttaatggacaatttatgcttatcagttatctcccctaaaatcaagagcatttgtatgattgtgactttatttggtgagacaaggtctctctgtttcccaggctgaggtgcagtggcgtgatctctgctcactgctatctccgcctcagtctctcaagtatctggggctacaggtgcacaccaccacacctggctaatttaaaaaaaatttttttgtagagttgaggtctcactatattgccgaggctggttttgaacccctggagtcagtaatcctcagccaggacaaagtgctgggattacaggcatgagttaccacacccagccaatgtgacttttgtcttaaattctatccatacctcttccttctgccacttgtgactttttttactcctccaacctactccagtgtacacttgagggtgttattgggtaagcggccatgacatatcattcggactctaaactttgtacagtgagcgagtgacacctaacctgcagagttgttaccaagattagacccggtgaaatagtccatgttcaaggcaactccagctcagtgcctagatacacaaatactttataagtggcatcataatcattgttttttaatacattgttatgacacgcattctccgtgattactcaaactcagaatagcaagtctcattcagatcatgtgtcataagtttgatgcttggctgaggtcagtgactcttcatatctgctaatattttagaaaaactcaaggtggaggaaaaaatctgtgataaagattcataccataggtattgtaattctaaagacagacattagaacttaattaagcaagacagtgagatttatcacagcatatgtgatcatgaaccaaactgtggaagtgggagtagagcaatagtagtgagagaagatgagtgatgtctggtagtggcaataagctgtacatcctagttgtttgggtttgaaccagggtctggaacatgtgaagcattctagaaatatacactattattatttaagaaaaataatttgagctaaaaatactacagactttcttgaggggagctcaagaatcatagtatcattatttataccttgccaaatactaagaaaaatatcaacattgtaagttattaagaaaataacccagaaaataagcattcacaattaagttagctttggataagaaggaatattaatcactcacatatataatacatatgaaaactgtcaaaataagtaaataggatttggtttaatgaatatggcctcagtgttgcaatatattaaacctagtcatcagccttaagccctctttttcttataccttacattaaatccataacagttcaatctccaaaatatatttcaaatctgtccacttgtcttcattctgacttcccccaccttatctcttcccccatccaactgctcttattcataacctggaccagtcctaaaacctcctaacttgtctctcttccattcttgcctttctataacccattttcatccagtatgatcttgtgaagaggttaatcatgggatgcaccttcgtagaaactctcaagggacttccacttttttcttagactaaactacaatctctctatcacatcctacaaaccactgtgggatttggtttgtcttcacctttctaacttcatcacattctaccattattcactaggatctatcaatatagctcctgctttccccttatatgcactaaacaattcccagtctcaggatatttgggaagctccccatatgtctagaattctcttctctcagctcttcttgtggctgactcttcgactggatcatagcccaaatgctacctttttatgggggttgtccttgtccattctgattaagaccatctctcatagttactgttatgcagttatttattttcctttgtataacttatcacagtctgttattatctacttgtttattaactgttgtttttttgtctccccagtgaaatataaaccccactggagtgaagtccttattttatgtactgttttacttactatgtccccaaaaacatataaataaataaactctgaatgatttgttaccatcatcatccacattgatgttttcataacagacatttattgggcacccattatgtgccaggcactttgcacaatgccttgatttctcttttcatagtctcaatatattatggagatactatttttaatatttatttttctctccactttaaagatgaagaaattgaggctcctcattatcatcattttcatcatcatcatcatcatgccagaaagtagaacttgaattgacattgttttcctttctcataccatggtcagaggaaagaatagggggcccttgggtgcagaaaagaataccaggataacccaaatgagctggtcaaacaagtagattatcagggattcttctgtcaaacaaaaaatagaacattgtgcaatttggtgtaatctttgtataatgtgtatttctcaatgtgtggtcttcagaccagcagcattgacatcatccatgagcctcttagaaatgaaaattcactggcctcacctcagcctgctgaaacagaacctgtagggttgggtcccaggaaactgtgccttagtaagtcttccaagtgattcttaaacactgctttgagaaaaggaagaccatctggtggtaagtaaaggaaatggaatgttaacaagagtaaggcaagacatttatattcagaaaccaaaccaacgaacaaaagtaggtttagtaggccttgtataaaatgatggatctcttattaaaattggagtataagggaggggcatcatgataaggaagaacagtcgaggcagagaccagagtaagaagtcagagtaggggtagatagccttcaggcagactagatcttcttgtctcgaccactttcactcaaattcttaaaatatcccttgtgtacataagattagtgacagaacatgaaattggactaagcccaaagtagaacaaaagtagctccaccatgattctatttacgctgattggtagaatgtgctcccctggaggatgggccattatgactgcactgagacagatctttaagtttgcagatgactctgaagctgttctagctggggagacaagaatatttggtaaagctgtgtgaatggggaaaataatagcagataaatttcagctgtggaaagtgtaatttaatatatctagggaaatataatacaaactatgctgatatgatgatgtactctttctgctatcacttatttctagaagaaaagatatcttaattgatgtcagctatcccttgaagacagtccaatggagtgtggcagttcaaaaggtcaatcaaatgccagagatcaccaggataaaactggaggaaagcagaattacaagatgttgtttatgtttgaacagagtagtattttagtacttggagtagagttcaaagttctactgagtacattctggtaaggtcataaggcagttggaaaggcctcaaaggttaactgaaatgatcaaaggaatgaaatattatagtaagaccagatgagaaattttcagcacagaaaaatgatgggtgaaaagggacacaatcaaattcctgaccatgaaggatattagtaactgaaacatggacttgttcaacaaattcaagaatactgtaggagaactctcctgaagcttgaaggtacttttaggacaaagaaaaaaagtttaagtctttttaatatagcctatagtaaatttactgatgctgttcccttctagagggttcatgaactggaaagataatcaggaacaaaaaaatatatatttatggaagatgagattccaaatggtttataaaagggaagctgtagattattatggatattttagtgtttaataaaggtagtactcagggcaatatgaaaaattatgcatctttataaaaaatgaagtccaggaattgatgactaataccgtattatagtttttaaatattctttaacatacatatatacatgtttgtgtgtgtgtgtgtgtatatatatatatacacacttgtatgcatatatgtaaaaatgcgctcatatacacacactatatatgcatatacatgtatacatttatatttgctttccttttaaaaggaaatattttgtcattaaagaaacatgtaagcattataggtaaatttgaaaatacagaaaagtagacaaaaattacatgtagcttcattcaccaaagagactactattaatatttcactgtactacttacatgtagtttatatatttcatattttctgatgtttatttttttattttatttttttcttttgagatggagtcttgctctgtcacccaggctggagtgcagtggtgtcatcttggctcactgcaatctctgcctgccaggttcaagcaattctcctgcctcagcctcccaagtagcttggattacaggcacctgccaccatgcccggctaatttttgtatttttagtagagacaaggtttcaccatgttagccagggtggtctagaacttcttacctcaggtggtgtgcccaccttggcttcccaaagtgctgggattacaagtgtgagccactgcgcctggcccattttctgatttttaaaagtaattactgcctgcaggattttgccactaattatgtagactgttggtttgagataggtattttttaatcaaaataatatgaaaatactaatataatgtaaaattcagtttatccatgtttagggtttttatatattaaaattaatttagtctatacatcttttgttttctgtcttaatctggtttaatattcaagtttgttcaactcatgaagtaaccacttttctaatacattatttctttaaatatcccattttatttccaatgccttttgttttatattttaatactatttagtatggaaagactgttttaggtgtgtcttttaatagcatgtgggtgcctcctatgtttgttcatatctaactattttcatgctgctgataaagacataatcggggctggaaagaaaaagaggtttaattggacttacagttccacatggctgggaaggctcagaatcatggtggggcaaaaggcacttcttacatggcagtggcaaaagagaaagagagatgcaaaagcacaaacccctgataaaaccatcagatcttgtaagacttattcactaccgtgaaaacagcatgggggaacctcctccatgattcaaattatctcccgccaggtccctcccacaacatgtaggaattatggaagtacaattcaacatgagatttgggtggggacacagagccaaaccatatcacttaccaatttgaaatattttgccttttccaaggagggtttggcttgttcatatttgttgtcacatacaaaataattatcatgagatatttgaagcaaacagggtctggctttgaatattgatactgtttattagctatattacaaagttgtatgaagattttaatttaatggtagatataaaatacttaataaaatgcctgccacagagtatgcattcaaattattgtgattatttcctctttgttatttatacctcttttgttttaataccattttgatgtttgtttgtatcttttactatatagtttttgttttaattttagtgcaactcagaagatagaagcactattataaattttacaagcaattaactttagactgatagaaataggtatttaaatgtatgaaaggctgatagagaatttagaatgccattatttctgctgcctctttctcctttggatttcattaataatagtactttcatgccaggtacattttctttatgtagaattgtttttgaaattttcctttgatttttcatcctatctgctgtaattactgtgcatatttaatcatgtccatataagcatgttaattgttcagtgacagaagtagaaggtgacatggcaagagaatgactgatgtttagtgaactatttgaagagtacatctgagagttcaagggtacaaacagtaaaaatgttttgtaatctctatatcgctgtgtttttttaattgatgcatgaaagcactttctgcatcatttacacaaggaccatatgtatttacagttaaaatttaaatattttaagacaagaatgaatgtttcacatttatttttattttctggcattcataaaaactgtagaggatattctgagtttatgttgtaaattgtaattttccaaaggactggcaatttatggttttttttgtttgtttgttttgttttgtttgagatggagtctcactctgtcacccagactgaagtgcagtggtgtgatcttggctcactgtagcttccgcctcctgggttcaagtgattctcctgcctcagcctcctgagcagctggggctgcaggtgcctgccacgacaaccggctaacgactttttttctgtatttttattagaggcagagttttgccatgttggccaaattggtctcgaactcctaacctcaagtgatctgccttcctcagcctctcaaagtgctaggattacaggcatcagccaccacctctggcttgacaactagtggttaatgaaaatatcaaagtttgacaactaacttgggttttaaatagtaaaataaaaaatcattctaataacatttctcagtctcactttacacaaggaataagaaaagtgatggaagaagagacgcttccctggtaatgtgatgcttaaaatccatgtttgcctattacgatgagaacaatattttggcaatctgagaagataacttaggatgttagatctgagggattgtctatactttgtaggaaatgatacttcgaattccagagttcagctaaggctgaaagttaaaggcaggatcactcaggacctggaactgcagcaccgtttctgcatccaaaactagctgtgcaattgctgcaaataaaatctgagcctaaaggcacaatatttgtccgaagaagccagagaagtcccagtttttctttaagagttttacaagcaaaagcatatagaaagccctgataagtgacaggagaaggagtgggaggtaaaaaatgtattaaaaagcaaaagaagtctatagcactggagctttaagagtagtctccagaccagaaacaggatcacatgggaaataggttagaaatgcaaaattttggatatcttcccccttctaccccagagctactgaaaataaactatacaggaagagaatcagcaatctgtttcatctgggtgattctgatacaggagaaccactggactgtagacttgatcaagggtcatttagtgtgtggatcaacaacttcatctcccactgaaggctctgttttattacatcataagttggtatttatgataagaaaagagtatccaaagttttagttgtctatttattttagtctgtttatgaaggcagataaatcatatatctcaaatagcttctcatcatctttcttgggggcatttgaagtggtaaccttgagctgtgaaatccacttgtgttctaaaatactcaatttctgcacaatatgggataaatatcatgttaccatattgtgacatgccatttataaatgaagaccagtcacacattcctgctagatttgacaattattctccaaagtaacctctaaaaataatttgacaattatgcccccaacctctgttgctggtgctattgtttcctttaaaaatatgaacttaggttttaacaagaaaaaatacctttctaagatttatatgaacaatgcttaagatagatgatctttatagaaaggtaaatgtgttatgtttcttctaaacacatttttctacactacacaaatttaatagtgaaaatatatgaacacagtctgctttctgaaagaatattataaattattcctagacttaaatttgcatagtcgttagaggaaataaatatgctatctggcatattagagaggatatctaaaattacagataactagaagttcatttctagggcattagacattttcattatttctattattgctttattattgttgctcttaagacatgaaatgaatttttagaaatgcccctaaatgcctttaatcaaattacaaaaaagagcaccaattcttctgagttgatgctggcactgccagtgtgcactggcttagagagctgagctgaaggctggatgtcagctccacttgtccctgggcagagacctctgtgcagtgcacaagctgacacagcctcccccaagctgtccactgcttgtcaaccatgggtcacaaactgacaacctaacgtccaaatgtagcctacaggctttgtttgttttggcctagtaagtagaaatagcttcaattcgtggccagtagttttgaattagaaaattttgcagaatcatctgaattcctctggaaaactagaagacatggcaacctggaacttccattcctgactagtaacaattggccggggctaaggggcaacttccctgctagaggaacatgtgctcttcaggtcacagttcccctgccttcctttgtattcatctggcctctgtgaacatctaggtttacaatttggtatgactcaatatagtcatcacctcttccatttttctctccaggtaggtttaacaacttttaaactctgtgtccactgaatcaagtacagatttacatagcagcatctgtaacaactaattgtacctctttgtttacagccttttccctacaagacagtaaacttctgatgaccagagatcagcctattaatccatctctgtaattccagtgcttattagattgagttgcatgataaacatttgttgataagtgaaatgaactgttttttagaaaaatgtatggtggaggtagagaagcatacttcctatttcccttctgtactacgtaggtattgccgcaataatactgtctaacacactacctaaaacttagcaacttaaaatgacattttttttttctcaagatgatgggtctttgggttggtggcagttcatctgggctatgggatttagatcgtagattgggttcaagtctgccctgtgtgcttcttctgggtcataggcagaagggactacagctacctgaggcattttctttccatggtgatagcagaaattcaagggagaaagctccacaatgcaaacacatttcagctcttcttacattccatctgcaaacatccaccttggccaagcccaaagtccaggggtggaaagtaacttccacccaccttgaaaacttggcaagaatgttaatgcagacatatgaagaattgtgatcaataatttaatccagggccaaaattagggtaaggcaggtgaggtgcaaaatttaagaggtgccaaaaatctcgtaataaagatacatattttaatacttaatttttgaaaagcaaaatcaacgcaaacatccataataaacaaaatatacaaatattaaacacagaatctgaccacccatctgcatggctcacctactcacctcacctcacctgcttcattgccctgttgggtcttatctcaatatcgatcccatctaaaacactcctctgagtggcagttaacaaactgctcttgcttgtatcttgagtctctgcattggtgtgaatatttgtatcaaaacattaagaattcaagtttctgggagttttattaatatataattaagctatccctagaaaaacagggtttagggcaagtagtttttaacacaaaacatctttaatttgtaaaaactaaattatgtaaaaataacattccactagaagccttttagaaaagtttgcattttttcttatacaatgcaaactgtctatatatttgtactagtcaactccttatattgtccaaatcctgaatttcatcatctaagcaagaccagtttggcatcagatttaagcaagatatccatgactacgaaattccctatagttggacttgaggggtagtaggagagctgatatagcaagaactttccagtccacttgaggatgtttctataaactttttcaatgtaactgacctcattacactctgcgaaggtgtaactacacgtatcccactgcctcttgggtcagtcaggcaaatgaaaagcaatcatatcactctttaaatgttttagcattttccagcttggactttgggaagtgggatccagtctgctcatgggatatgtgttgactacctcttatggaaggggccgttccatgccatgcatgctgccagacagttgtgctactcctggctgcctgggttccttgaagtccattcccagtgcaggacaacctcacggcaacattgacattgcacgttcaagaatcttaaatgattcttactgaatttcaaaccttgaggagaggacactgtggtggtatcagtaaggatagctgggacatatttaagaaggactgagatgaagtaagacctgaaagacaagcgtctacaatttctacctctaaaaggtagaaaggcatctaaccatttaaaaaatacattatcatgaacaaaacacagaaagatgtatatctctgttggcgttctagctaaataaaataatagcagtatgaaaaatttttaaagggagatagtaactggaaaaatctaaaagaatgttgttactgattcaggatatatattttcagtgtgctgttccatgtgatatcatgggtattttatttttgtgtacaatagcttcatagggactctgcagaagttattcctgagtcctatcttttaccaatatcattatgtttaatgaaatcataagtttcttatccataattctatcacagtgttgatgtgtgtgtgtgtgtgtgtgtgtcttatttcccaaaattggaaaatataatgagacaagagcttctatcattatgaatgatattgaacaatgatattgaataatgatcaatatctttcaaagctatcatttattgaacattagctatataccggatactgtgcaatatatttcatgtgaatttatgcttctcttcattacaacccagtatacatctgtctccctattttacaaattagaagacttagattgagaaagggttaaatggcatgcctacatcactgatagatgtccaagttaggattcatgttcaccttctttcttctcccccaaaactgaatccctatggggcacccctgctttgccattcagccttgagactatgtttcagctgctgtgtagtttcccttctcatcacactaataaacactacattcatgaagggttgttttacagcagactttattcttaacatttacatatatcatttcctttaatcctcatatgtcatatgttgttgttgttcaccattctacctgtaagaaaactaagtctctgagagcttaagtgtgttgcttggtcacacagctagggaatggccaaatcaaggttcaaacccagatcagtgcaactctagatgtcatgcttgtaacccttatgcaaagctgtctccagtcatgccatgcttcctctgtgatacagcaggaaactcactgaattaatagtcacagatatcaggtttttatcccagatgtggctattgccaagtcctgtttctttatctgttaaactgtgattaatagtccctgccctgcacaagtcatatcattgctgtgagacttcaaccagaaacaaggacagggaagcttgaactgcaagctcttgttaaagtactgtcagcaacttgagaggctgagactgctgtaacaatttgctttgtatctcacataagcctagaagagttcttgactctgaagcttatcaggacccagccggaaagcaaatacacataaactgctggtaaaagaaaagtgaagggcatttcttggaaatgggaaaaggctcttcctccttcccctcctgcccctacttaggggcagaaccatcccaaaatgtaatcaagaagaacagtttgaatactcaaggttttatccttcctcattaatatgttttccattatttgtacttccattatttgttcagttctattttcccctaatttgttgcttcttggagtcagcagtgagtaggaaatgccaatggctgatgattcctcaaatagccctgaagatttaatcctaagttctgatgacccaagtatgtgtggtaaagagatgactgctttcctcttgccttcaaagtggttttcagcagtgctggtctcagctctcttgaacctgcaggacagacagtggcaacactcttgtcaaggagccagagtctcagattataacatcttggtgataatatattttgcctgttgccaaagcatttcatttaaaggtttgggcacatgtaaatatatttctggctttccttttctaagttccctcctctaacctctttagtctcaatttgagtttatttccatcatagaaaaaagaatgtagaaggctaaagccccattagtaatacagtagtcagggacatctcacctatttgacaattatttattgaggacctatgtacacaggcactctgctaggtaccaggggcatggttggcactggagacatggttggctgttttctgccatttagaagcttaaactttccatttctatattgtttgaaggctgtgattatcttcctgataatctacgtgctctttttatacttctctccatcaaatttttgtatctgtctcctgattcatcaagttatcccccagaataggggcttttagggaaattccacagaaacctgaatttcctactctctcttaattgaaaacaaactctaatttctggacttactctctctgtgtctatacaaacctgtccatggccattttcccatcctgggtgtgtcatgcagccaggctgactcatctttccttgtaataaatcaactctttaaaaaccatcaccacattataacacatctgagcatcagcactctgacaatagaatataatttgatagcagaaggctctaaacaaattcctttggacaagagagatatagattatataactcacacccaaagatatttaagtcaaatcaatgtggccaggccatttaactcaccaagagagaagggttacagtcggttacttaaaagcctccctatcttttaccttatggatatgggcatatcaagactgaatataggctgggcgtggtggctcacgcctgtaattccagcactttgggaggccgaggggggtggatcacgaggtcaggagatcgagaccatcctggctaacacggtgaaaccccgtctctactaaaaatagaaaaaaattagctgggcgtggtggcgggcgcctgtagtcccagctactcgggaggctgtggcaagagaatggcgtgaacccgggaggcggagcttgcagtgagccgagatcagatcgcgccactgcactctagcctgggcgacagagtgagactccgtctcaaaaaaaaaaaaaaaaaaaaaaaaaaaaaaaaaaaaaaaaaagtctgaatatatctctttagctatgaccaccttgaaatggataatcagcattttctcctaaaattccagatttttattccaaagcatctcctggcttgttgctcggtcctgcattgccagcaagctagaagccactgttcggtaatgtttcagttgagaatgcacggaccttgagggttagtttgccctcaatcacagtgggcaggagtggcactgacatgagaatctctattttcagagttctagtccagaatttctgttacactaacctgcctccatagggcatatgtactttacaaatctttttttttaactttaaaatctggaatgcatgtgcagaatgtgcaggtttgttacacaggtatacatgtgccacggtggtttgctgcacctatcaacccatcatctaggttttaagccctgcatgcattagatatttgtcctaatgctctccttccccttgcctcccaccccccgacaggtcccggtgtgtgatattctcctccctgtgtccctgtgttctcattgctcaactctcacttatgagtgagaacatgcggtgtttggttttctgttcctgtgttagtttgctgagaatgatggcttccagcttcatccatgtccctgcaaagggcatgaactcattcttttttatggctgcatacaagtcttttcaaaataaatttatatttggaaagcagtatgtagactcctatgggaaaagtatcatttcaacttgatgatagctaagtattctgaacatgttaattaatgttttattctccagatatgtagttagatctccaatagcattagggtcaacattgtgtcattttgcataaattgcaaacacattacaatttgtgttattattactaatagttggataggcacccatgcttatttccatgataaggagaatataggcaagtgtagaaatttgcagtgaattgttcaaggatgcccaactagtatgtatgatatggggcagtattttcaatgaagatgtgcacatttgctgggtctatagatgtagataaaattattgtgaggaagtttatatgattttgtattagggctaatctagctttgaaaaagatcaatctatatattatgatcacttcttctctaacctgacacactgttcataaaatgtgatctttcatattccaaatgaaatgcatttttttccctttctctatgccttaaattgtccgtgtccttattttccttattttaatgttttctttttctgaatattttctcaagtattttcaacttgaaaaggagtatatgaacactaaaaataacttcaaacagttcagcagtatctaaaatgaaatgtaaacatcccctctattaatgtcttcctctcatatgcacatcacatctttaagtgtttctcagatatttaacaatctacacttggaatctgcttgatcaagaaaaaatgtgtggagggagaagaccccaactattttcttatctacttatattccaggactgttgtgatgattacataaaatagggtatataaaagtgatgaggaagttagaaaggccataccaatttaagttactgcattcattgtatgaaaagctttctactcagctcaagtacccccttttgtctgtatagctttggcttttgtagtgcttagtgtcatttccataaacagagctaatttacttctttatatgttgacaatcatttaaatgatttctcacttatttaaatcctataataggctgggcatggttgttcgtgcctataatcccagtgctttgggagatcgaagtgggaagattgcttgaggccaggagttcaagactatcctcggcaacatagtgagatcctgtcttacaaatatttaaaaattagctgagcacagtcacacatgcctgtagtcccagctactcaagaggctgaggtgggagaattgattgatcccaggaagtcaaggctgcagttagctatgattgcactactgcactccagcctgggcaccacagtaagactctcctgtctcaaaaaaaaaaaaaaaaaaaaaaaaaaaactcataacattgcctttaatacctctctaatattccttacatcattctacggtatttttatctgttgtgaagtcaaatatgtctctggctcaatccccaagcagtaaccaacatcccttttcaaagaagatatgcttatcaaatatttacgttttaaatgaattaataaacaggtgagttacagaaatatttcaaagtcattgtgaactttcattctcagtgcttagataacaagtcttaccaagacatacagaagtgtccatacatcctcaccccttctctatggttgccccaccgctgttagagcagtcccaaacatgagacaacaatgcacagcctcgactgatgtcttctccagggctttccgcctctgtgacccagtccaaattctcccacaggatatattgggtgattcctgctgagttcaacctgtatctgcctgatccatttgctagtggagtcctttggaccttccagaacagtggcctgtccctacccactgagtcattctaatgtagcactaaggcaagaacatgcagcttatctatttgtatcagtgactttcaaagctgcctgaacaaatggttctggctggatttatttcaaagcattgactacggcaggcagaaagcttcctgccaggcggttatatttaccacacaaatttgtcagcttaaccaaacatttcagtgtgttaggagcaggaatttgaattgattgatctaaagggctcaaacactatgaaagagatgaaggtgcatcagctgacattacagtgtctgcacgagtccaaaatgatcactaaataaatgttacttttcagaaagattgtgctgttatcttatctccctcccatactgggtttgcaaaagcaatcggagtttcatgagtgttggaatgtttaggctaaaacaccatggtgatgttagcaacaattttgaggtgccctgatatgtttaaattatatagcaaaaatactattataaactctgagcaaaattgtgggacacagggatctttgaattcttactacagctttcacatcacctccatttatatgtacctgtgttcaacttccctttcattaaaataggaattattcattttcatcgtattgctggcatactctcttcataatccaaccttaggcttgcaataaaaatcttcacaacccaaataccatgagaatacttgtggttaagcctagaaaatattaactgatcactcaagaatatatataacaattttcagtatactagaaaaatatcactagtttttttttcagtattttttggagatgaaataatcatactgtttgtaattgtcttaactattaccagctttatgtaatttgtcattttactatattctacatatgtactctaatttagtctgacttattttattctgccaatagtcatttggggaaaaattacagtagtaagacagaattttctgaacatttaagatcacattcaagcaagaaacaacatattttgcaaatgggtcttaggaataccctcagagaagcgtagggaaatatttgagaaaggtcttatggttctgcaaggatcttggaatctacaaggcagattaatagcccaattatttccacaaagctattgccaaatttcttacaactgattatttaagaagcaatttttaaaagccacattatttatattaattgaataacaatataaatggagcaaatggagttgattcgttcctcagtctcttgtaagtctattgtggtaaattcattatagagaggagttgtataaatattctaatttcaatttctctaagtcataactgaataccagcttaagttatgtctgtatgctttaaatattttttaaggtggtaaactttacgaacaggtttaggttcacagcacagttgagcagaaagtacggagttctcataacattccctattttcatacatgcacatccttcctcactatgaccatcccacgcctcaatgatgcattcgtgataatcaataaacctatattgagacatgattatcacccaaggtccataatttacactaggtttcacccttggtgttgtacatttgtgttatatgggttttggcaaagatataatgacaagtatccattatagcatcatgcatgatagtttcattgtctaaagaatcctttgtgctctccctattcatcccttcctgcatgctgtgccctggcaaccactcatctttttactgtctccgtaattttacctttttcagagtaccatgtagttcacatcatacagtatgtagccttttaaaattggcttctttcacttagtaatatgcatttaagttgctgtatgagtttagtagaccttttttttttggcaccaaataatattccactgtcaagatttaccagttgatttattcatttacctatcgaggggcatcttggttgtttccaaattttggcaattgtgaatagagtttctataaacaactatgtgtagatttttgtgggcatacattgtcagttaagttgggtaaatatcaaagagcataattgctggatcatacgtgaagagtatgtttggttttgtaaaaatctgccaaactgtccttcaaagtggttgcaccattttgcattcccaccaataatgaataagagttcctcttgctccacaacctggccagcatttgatattgtcagtgtttgggattttggctattccaataggtttgtaatggtaccacattttttgtttttatttttaattctcaaataacataacatatgatactgaatgcatgttattaatgtatacttgcttgccatctgtatatttatcttctgtgatgaggtgactgtttatgtctgttgcccattttaaaaatcaggttgcttgttattgttgagtttttaaaagctttttgcatatttgggctatcattttttttttttaaatcagttgcatgtcttacaaaggttttctcccagtcagtgacttgtcttattctctaatcttgtctttcacagaacagaggtttttaattttaacgaagtccaacttatcaatgatctctttcatggattttgcctttagtgttgtatctaaaaaatcaaaaaaacctaagtcatttaggttttctcctgtgttatcttccaggagttttatagtttagcattttaaatttagatctatgatctattttgagttaattcttgggaagagtataaggtctgtgtctagatttttttttacatgtagatatccagttgtttcagtatcgtttgttgaaaagactgtctttgctccattttattgcctttgctaatttgtcaatgatcaattgactacatttattaactatatttgaaaatagctttctatttctgagctctctgtcctgttccattgatctatttatttattcttttaccaataccatactgtcttgattactataaccttatttagttatagatttatagtagtaaatcttgaaattgaacagtgtcagtcctccagctttgttcttacccttaaatattaggtttgctattctgggtcttttgcctttccatataaactttagactaagtttgttgatagccacaaagtaacttactgaaattttgattcagattcacatggactctatagatcaagttggggagaaattacgtcttcacacaatcagtcatatcaatgaccatggaatatttctcaatttatttagtttttctttaatatctttcatcagattttaactacattttcatgcttaatggattaaaatttgtaaacatgttttaattaagaggaaatatttttctctataaagctcaaatttgattttaaaatgaccaaagttagaatggacttcaatgaaacaggcaggtacactttttccagttgagttcaatttgtcaatagcaaggccgaaaacacgcatattgctttgaatctcttgcaacttcagtgccctaggattgatgtaaatacttaattatttctgagtacagcagacaattctctcaacactaggatagactatttcctgaaacttcgatagaaagaacaatcaaatggtgaagatatgtgaaaggatatgttgttcaaattaaaaggtttgctagttcagtaaaattgaaaaaatgtaatatttatgatcatttatgatctttatggaaccttaatgacctatcatttggagttttctagccattagtttatatattcattcattagaagtgtatggaaaactcataaaatacaaccaatatagtagattataactttgctggaaaaatagacatttataaataattataatataagggaactgaaagtagagcaatcgatatttcaaaaataagtgataatttgagctagttcttaaaatattagtagaatttttttcagcagaacaaaggaactaaagagatgcaagagaagagtgtttttaacaagtatttgtagaacatctgctaaataccatccacataattaatattaataggaccattatctcctgcattttatagacatattttcttttgatcacatatctcacaaatattgtaaatgtgattttaagagaagactataaagtatgtgtgaacagaggaaggctctctcactccactgtgggttttcaggaaggaccatgagaaattagtgtccagggcaagatctgtgggaatagcaagaacaaaggccaggaggtatagagagtaccttgtgctccatgtgcgaagaactcaataggatgtgagagtggtaaatgatagaaaatgaggtttaagaggcaagcaagaacacacccacagagccttgcaaactaccttaagaacaccaagatgtcatggatagttattatcaaggaagtaatatgttcagatgagcattttacatgactgtgcctgctttagcacagattgggagaagaggcaatgttagaagctggaacaccaataaggctattgcattgattcaagatactataatctcctgaattagaacagtggtatggaaaatgaagtgcagcaggaaagcacacaaaaaaaatggagtggcacatgctctggagtgaggaagctttgtttatttctttgtcaaatcagcttgttcttttttcatattgttctttctttttaaattatagtttctatttcttctatccttttattattttgtatgatttattttatagcatcttttagtttttttataatctgcatttttttgtggtaacaatctatcaaaaatagataatctatcaaaaaatagatttagaaatctatccaaaaatgtattcaatacttgtaacctgtaattattaataatattgatctgtgaatggtgtaagttggaaatttgtacttggatatgagagagaagcctaaagtggggaaattatcctcataaagcagaataaaaaatagcttttaataattccatattttcaaaagataattttcaagggtggttaagacacaggttggtattaggatacaagagacaggaaaagaagtgaggaaatatttcaaaactctaggaatcagcagttgatgacctaaactggggcacggacaatgaaaatggagacacggaaacacatcagagacagaaagaacaggacttggtggccataggcatttaggataaagaaggatgtaaatttaaagataactcacctgagtgacagatgaggaggtgatatactcagctggagaatattgaaggaggagagacatgttgtcgggaggggtcaggaatgagttcatttgtggatactctgcttgaagtggctcaaggaagctctgaaagtggttgaagctagaagtaaggatttagagcaagcttgtccaacccacagcccgcgggccatatgcagcccaggatggctttgaatgtggcccagcacaaatttataaacgttcttaaaacactgaaattttttgtaattttgttttttagctcatcagctatcattagtgttagtgtattttttgtgtggccgaagacagttcttctaatgtggcccagggaagccaaaggactggacacctctgatttagaggtcatcaatttggtttagtttttgtgaataaataacatttcaggggggtgagggaagaaactataattgtaaataggtcaagaattgaatcgtgtgaatgaaagagagtaaaaacagagttttaaatgagttcagttggctggatttgcactgataaaacatgaggaagtaactaggtagaaactggtttgcttttcagagcattcatgtttaagccagtcccagaaaattgttcatgttaactcaaatttataagtgatggaagactacttaaaaccaactgattcactagctgtgtggtcttggatgagttattgaaccctctaaacgcaggcatatacacttctgattcaggagctacatttgtatgtttgttacatggatatattgtgtgatgctgaggtttgggcttcgatggaacccgtcacccagatagtgtgacgggtttgctcccctcccttcctccccactttttgagttcccagtgtctgtcattcccaaacttaagtttatttaaattttaagtattgaaaataaaattttgtctataattttatcaagcactagatgcagttttttaaatcatcacacatgggaggcacacaataaataatatttattcataatggttccaatgataaaatgactgccaagcagaccaagatatatctgctgtttttgctatgcatctggtttacaaaataagtcaatatactattcaaagaatttcatgggatactagtatgttttcagagtctgctggtgagcactgagtgacagaaaggttagctgggggaattaggcagtgattctgtatcataattgtagctctgaaccttcttcgaaactttgattttttatgtgtatacattcctgagccctactgacttcatgctagacactgaaattaccagaaaacaacagcaaaatgaaaaggtatagtttctactaacatggactttaagtaggcttggagatacacgcacccacgcatgcatgcacacacgcacacacacaatatagctactcaaaattttcctggagctcgaaatttccctgggtttcaaaactatagattttaaaaaatttctaggttttgtgtatattacaaaccttgtagtgttagagaatgacagattaaggagggaaaacttttatcaagtaaatatccctgaaggattttcctgtaattaaaattttttaacatttgtgataaattacataaatcactacactttacattgccagcagaaatcaggttagacttttacatctttcaacttctgggtctgtcactcatttcttttaatgtctacatttttaatgttgctttaggcctgctgtctctactttactaattgacatactttctttttctttttattctacccatttgggaaactcatttatttttcttcaatcatctttaaaaaattgaccatggttcatcacagtttattacccagtgactccaaaatcaagatgacatatttgatataaatgtgatcatgttcagccaccattgcacaacattgatagaggatcaaagcgtacccaacattatgatatttccttgtactctttactgacttcattagcaaactgagctttgtaatttggcttcctctccctctttaatccctccaacacggttactctcataaaacaagtcaaattcactttctgtgaactccaagggattgttcaaaatcaagaccttattgatggattgatgtttgaagtaagtaaataacaggattaaaaatatttttgccatatagtgatattattttatatttatatttttgtagtaagactaaagtaggtcacacgctgaattttgatggctctttagagagccgtacaatttcattgcttcctataatcaggaccaatagtacccataaacacatgcttatgttaattgagggaacttaacgatttttaaaaactctatgatacagcatttactaaatatttgaaattctatgttgtatgctaagaagttatttctaaagaaaggcccggtgtgggggcctgttgtgcggtggggagagggaggagggatagcattaggagatatacctaatgttaaatgaagagttaatgggtgcagcacaccaacatgacacatgtatacatatgtaacaaacctgcacgttgtgcacatgtaccctaaaacttaaagtataataaaaatataaaataaaaataaaatgcataggacattgtgcactaagacacaatgatagcactgattctgagatctggcaaaactttgtcatgacctattactggatgaaacagcaacgatgatctatctttatatgaaaagttcagtgctacctttctgtaccacaataatggatattggggtccttgtctgacagtttatttcagaactgagccaggaagagggtatacacttccctgatcactgctgaaggaaagcaaaggctcatgctgaaagccaccatctgcatgataccaaacaccacaaagttggctatgcctccctgcacaaatacattgatgcatttgtatggcttaagtcatcgagttagtttcaaaaatgtttgtaaaatttgtttgacttttgacttcaaactatactacaaggctacagtaaccaaaacagcatggtactggtaccagaacacagatatagatcaatggaacagaacagagccctcagaaataatgccgcatatctacaaccatctgatctttgacaaacctgagaaaaacaagcaatggggaaaggattccctatttaataaatggtgctgggaaaactggctagccatatgtagaaagctgaaactggatcccttccttacagcttatacaaacattaattcaagatggattaaagacttaaatgttagacctaaaaccataaaaaccctagaagaaaccctaggcaataccattcaggacataggcatgggcaaggacttcatgtctaaaacaccaaaagcaatggcaacaaaagccaaaattgacaaatgggatctaattaaactaaagagcttctgcacagcaaaagaaactaccatcagagtgaacaggcaacctacaaaatgggagaaaattttcacaacctacttatctgacaaagggctagtatccagaatctacaatgaactcaaacaaatttacaagaaaaaaacaaccccatcaaaaagtgggcaaaggatatgaacagacacttctcaaaagaagacatttatgcagccaaaaaacacatgaaaaaatgctcatcatcactggccatcagagaaatgcaaatcaaaaccacaatgagataccatctcacaccagttagaatggcaatcattaaaaagtcaggaaacaacaggtgctggagaggatgtggagaaataggaacacttttacactgttggtgggactgtaaactagttcaaccaatgtggaattcagtgtggcgattcctcagggatctagaactagaaataccatttgacccagccatcccattactgggtatatacccaaaggactataaatcatgctgctataaagacacatgcacatgtatgtttattgcggcactattcacagtagcaaagacttggaaccaacccaaatgtccaacaatgatagactggattaagaaaatgtggcacatatacaccatggaatactatgcagccataaaaaatgatgagttcatgtcctttgtagggacatggatgaaattggaaaccatcattttcagcaaactatcgcaaggacaaaaaaccaaacactgcatgttctcactcataggtaggaattgaacaatgagaacacatggacacaggaaggggaacatcacactctagggactgttgtggggtggggggaggggggaaggatagcatttggagatatacctaatgctaaatgacgagttgatgggtgcagcacaccaacatggcacatgtatacatatgtaacctgcacatcgtgcacttgtaccctaaaacttaaattataattataataaaattaaaaaaataaaaaaaagtgaattaagactccagtaaaaatttggagccaatttgagtagacagctctcaattccatttttaaaatatcaagggatatagatttttttaaaaatttttatctaaagatctttaagtatttttatttctttatatcttattttccataataagcatgcctacatgatttatgtggaaaaaaaaaggcccggtgtgaaaaatgttttctaggagaatgatattaaattgatatataaatatatattatgtataccttaccaagtgagcacatatttccttaatgataaatgatacttctaaagcagaaagcaagactgtgaagcaaagacctgcaaatggatgcaatttagtgaacaaaagagggatgcgactgcctgaacatgcacaggagtctgaagtggtcaggtctggggcacactgagcatgtgtcctgggaaatagtgaagcaggatgaaggtggagggcatttttgagtgggaaggtgttgtggaggccaggttaaagggaaagtatggaaatgcacagggaaaaataccttgaattcttaaccgtttggcccagggtgaacacttggtgcaaagagaattctaacacttccaggaatgttttaaacaatgctgtttttgctttggagcagttacttatattatctggcataccttgttcaatattgaaagctatttctgattatctctagttttttttttttttatccaaactctcagagcatcatcaagtgtattatagtcttagcctttgtaagaattggtaagttcacaaaacattttatttagtgcttaccttgcacaaggcttgagagattttaaaaaggtgcataaggaaaattcctaacctcaaaacatgcatattacaatcactagactttaatggatagagacagccttgtaaataaataattctcttgatatgatatgataagtacagttagagacaggcatattcagaggctacagagcatagagagaataaatagctagtttcatcaatagtaaatttcactctgctctttttaaggaacttacctaaggagacttggaaagaagacaaaaactgtcttttaatctgttatgattgtaatttaattcagaaaaatgctcattccaaaaagggaaattctgaaatagtttaccaacattatagttcagaaaaagacatttaatgatgttgaatctaaagactaacttttcaaattgtccattatttgttaataaaaaacatgaaatgatataaattccaaaggaaaagataaggcatttttattaattcatccatgagggagcctgagagaaactttgtgattgtggcttttttaatctcaattttttttaaagaatcatggattagggctatagttgggtttattgccatgtacgtcaatcgatcgtaattgatttagtagtgtttgagggactgtgggtactattttctagtttaaaaagtctctataactttctgtcacaggatctgaaatcaccagagatttcttaaatgtttaggtcattccagaagtccctacttaaaatttgcttagaatgtctactagtttcctattactgctgttttaaaaaaattaccacaaatgtagtggctgaaaacaatgtaaatatattatttcacaatcctggaggccagaagttggaaatcagtttcaatttgcagaaatcagcgcgttggcaaggctgcagtcttctaggtgctctaggggaaaatccattttttgcttttttcagtttccagaggctgcctaaattccttgattaatggcctattatgccatcttccaagccaacagcctagcatcatctttcctctctgatccctgcttctgtttctacttcttcactctctgatcttacccttttgcatctctcttttgaggatccttgtgtttacattgaggccacccagataatccaggatattctactcatctcaagatccttaacttcacagctacaaagttcctttcaccaggtaaggtaatatatgtgcagattccagggattaagatgaggatatcttttgagggtcattattcaggctatcataaaggtaatactttaaatgttgctgtgatccataaatattatctcagagaagactgtaaggacaaggttcttgaagaaacagactaagtactagaagtcaaggctagattgacaaaacaggctagaaaggacatgcttgattttttttttcttaaaaggaaaactaccacaaaagggtaaaaggaagattcctcctcctccaaactatactgtgtaattttttaaagtacaaatttctaagcaatgagaaggtcataattttatccacttttctttagctgatgctattgccatgcaccttatatatttaatgaccttgcaaatgtgaattccaaaaatagggttaaaactatggcagagaaaagtaataataatttttgtgtttttttctttctgcattgcttgttcttcagaaaggtatttggttatttcaataaatgactttagaatttaaagcttaatttttttaagttattctgaaaaggacactggaaataaactatcccacacacacatttttactgagaaagtacagtgtgtcataagtaatttatatttgtggtctaagatcatacttggtggcaaacccaaacctggtacacaggtttcctgtcttccaaatgagttctctttccactggatccattagctcaatgatttgcacttgagttaaatctcagtgcaatatacaaactacccatgggcatcttcctttcataaacccattaatatgagagccaggaaacattttctcagtacattcaataaactccactgatgtacttggctctgtggggacccataaaggaatatcatgcttgtcttccagaagtgcttctctccattgctaagaacttgaaaatacctgagatagactgctaggaattcttcccaaaaaaatccatagatcatttcccatagtaaacaagcaatcctatctaacctttttcccttgctattttgaagccaagatttaccctgaagcaaaaagttgtttgagcagggggttatggcatggtcatgaataaagagacattgcttataaactctgctaacttgaatgattcactttccaaaaatgagcagcataaggagagtacttatttatttatgctttataatatccaagcaaacaaaaataatttttgtactgtttttgaattgcgcaggcattccatacacttttgagagctaataccctgaacaatctcaatttttttctgtataccctccacccctaaaccctactttgtccatctctgctgtgcagtatcccccaggagactgacacaggctcttgggacagctggcttctggtggagggacagctggcttccagtggattgcccaatcggaggcaccaacaggagaaaatagataggacagtgaaaagcaagggttcaaaagcaaggattcttgggggcttttctccattctgtattggtctgtaccctccttgagtacagctatgttaggcgacagctcttccatggctcctactgtttgtgatctcacgatgggaatcactgtttctccctttgccccttcaggcctatcagtggtcatgactttctctgtttcaaatctctgggtgtatcccttaatccagcccactcatctgtaaccagtctgtttattaagctttgccttaattaatatgaaccacttgaattgaattttgctttgtaataggcttaagtcgttgacatgcgtctttcctgctatgtaagaggaaactcaacagcgatttgaacgtctttggagcccctgtgctctgttttctgcctattctactcctccctctggttggctcaccctatactaatggtgaggcagggaaaggtgctcagaagcagcatgcttaaatccctctgaaatgaattgacacatttccttttcccagtccagtatcccatgtttctgtgggtcttaagccctggtaagtagaatagcccagaaaatgtggataaaaaaccacacaatttattactttggctgtcctggccttgttttaaccattttatatataagtcctattgttttacttcatggcctcattctttttcatggagcaaatccaacccaaacgcctctgtagaccttctcccaaggtagagttaactgagtatggttggcctgcctagcaatactatttatttgatttgcaggtctctttcttaatgacaatgtaattactcaaatgtcaaaagttctctgccaaggcaaccaagtgtataatatgtactgtatagttttgaccaggaccttgaattcaagtgggtcattttatttctgtattcttggtaataatgcttgtgctaataggaatttgcaccattctaagactttgtcttttgaaatttttctttcctgttttgtgtctctctttctacagtgtctgtctctctcttcaagttctggttaatctatactttcttctagatttaccaccttaattttctgttgctttctcctcttctgatatattagatctctctctagatgagctttcacattcaatatgtttgcctcctgataacttcaaaaatatattcggtatatttatttagggaaaataaaaatgtaacccgtatgtaacaatagaaaatgaaatacagggacaggattttttggcaatataattgtggcactttatgcaagtaaaaattagataatgttgtatggataatggatgatgtaatatatgcctatgtagttatttaatgcatcttaacttgagattttagacgcattaaaatacacacattttactttgttcaatggtcatcagatttttgaaatttctctctttgtagttgttagagccaacagaataaagggatcttggaaaggtgtatattattcttctagcatttattaaccatctatactggtccaagaattagaatagattttggtattacgaaatttaataacgcaaagttccatcctccagctaccctctgaggagtcagagatttttaatggatcacgagatggagtttatagcatcttggtagacgttgttagggtaacagagggaaagagttaataactctgaggagggtgaccaggcacattttctactaatagtgagggtgttgaaggatgaattgcaatgcatcaggcagggactaaggaaaagtattatatagaggagagctccatgtgtgacaagacatacagacaggaaagaggcttgtcacagggcttggtggtgggtgggtgcagagggagcagctgtgtcccttattcagcatcccaccctctcttgttatcttggctctatcctttccctctgttactagttcaggaggctcggagtctcactctagctattgccctacattgccctcttcatatcacagcacagacctcaagataatgtttggaatttacctcttaaccatccactcatcagcaatggaaactagattcaaacaaccagtaaaattattctgtaaataatggccaataaaggttgtgcttacagacgcagtggaatctttttagttctcatgtaatttagctagggataccagataaatacaaaataatttgcatcttaaatggtaaatttaaatttaattagtaaaatctaaatttccaataaaatagctactttttagtgtaagcagtttttgtgatatactaaaaaatatttgctgtttatctgaaattctaatttagttaggagtcctgtatttttccacattaaatcaggcaaccctaaatttcccccttcggatgagactctgtgaacctctcacattctctctcccttagcctgtaagttgcattaaaaaacaacaacaacaaaaaaaaacggttctcctggtctcacttttcttcttcctctagtagcccatctctagttattcttgttctctagggctctgctctttgttcatttctttatgccaacatgcttttcctggacaatttaattccctttcttggtttttactgctattcacctatgacttccaaatctctcccaccatccaatatcttgcctttgacttccagacctgtctatccagtgcctactggatgttttcctctggttgtcctatgggcatctaaagcaccaaatagctgaaatgaacaaacaatctttgtctccaaattgcctctcccttgaattccttatattagcaaataacactaccaccaaccaaattaccgaagtagaaacctgggtaacgtctcagtgtcattctttcccctcacttccattgaccattgcctcaatcagccaacaatgattctttataatcctcctttacaaaatgctataaattccctagaacctacttagttgacttacttatctcaaccagattagcctctaatgcaatttccttatttgccccgcccccactctctctctctctctctctctctctctctctctctttctgtgactctctgtgtctctctctctctttctcatcagtcctctccaacattctaaagcttctaatttgaatatatttcttaattgcttatgttttcataaagtatatttttcaggataggctgaaaagtttaaattagatgaattatattctccacaatcagatccctgccagccttcctagccttatctctgaggattaaagaagacatatgactggtttcattgtttcttgccttgtgtgtagcaggtattcaataagtatttgttgtacgaatgagagaatgatagagatcatttttacagagtgaaagctgtttgcaatattgtcagagaagagaacattcaaagtacaatgataagagttcttacatttggaagacttgatttgacacataatatttaaaaaattacttaataaagaattatgattttatgggatttctgtatgaatgtcatacatagaaatatttagatacatataaatcttaaatgctcctaggaagatatatatttacatacctacttaaatacactgaatctgttttactattaggaatagccaataaatattgacattctgattgtttaaatcttctgaataattaatcactatttttctaacatttagaatatattaaaatacaatccacactgtaattataggtggcataattaaacctttgtcacatgtaaagatagttcagaagactgtaacatttaatttatctgttataatcattttgatttatgagaaagtggagaagcctattttcagatgatatgtatttttcagttttccaaaactcaaaattatcacataatatataaaatgatttctaagtatgtatatatatcaacattactctccagtgattttaagtaatggagatttttctaagtgtaaacctaaagacatattgtttagaatatggtataaataaatgtgtcttttaaagtttaaagactactcaaagcattgttatctactaaataagtgtgggaaatttaatttaaccttccagataatgtgtgtgaatgaaaagaaattataaatatagcatggggtggggaggtacttgccattcataaaataattccctttggtatgcaatagactaagcattgggagaattcatgatgaataacacaattccatttgaagcctctgtagaattatttctatgtagttagtaacaagtggagcttggggtattattaggcaaaattacaacagcagcacaccgctgtgcagagaaagatcagggcatttcgtctaagcagcatcttcataactctggctcctaaaactaatgttgtgaagcttcagttcttttgaattgaaactctggggaataagagagggtcataattattagctaggaattgatgctaaatttgtttattcactgatttttccaccactttctatagtatgtaaatgagatttttacttagaaaaaacattctgactctgagacagatgacagctgttcaaccccaggggcagaaaaaaaacacagctttttccttggccttttctttttcgttagtgcagcttctagagcctcattgaattttcccagaattccctgtgcaggagctttcaaattctgattgattagtcatcatatcagagcttaccactttgtagctcccctgctaccaattgaacattatgaacagggcccagaaaattagcttgctcagcaccattgggattgtggcctgtttagcaatggatgtataattccctatgactctagttagtagaattggcatcagagtggtatgaatagaatgtcttcagaaaggagtctgaacatcttttgcaagttgacaannnnnnnnnnnnnnnnnnnnnnnnnnnnnnnnnnnnnnnnnnnnnnnnnnnnnnnnnnnnnnnnnnnnnnnnnnnnnnnnnnnnnnnnnnnnnnnnnnnnnnnnnnnnnnnnnnnnnnnnnnnnnnnnnnnnnnnnnnnnnnnnnnnncacacacacaaacatatcttcccagacctcttggcagaggagattatagactgaagtagggaatgacagaagcaagaaaaaggaactcattctggtgggagatgggggagaggtggttttcaatggttaattcttctacctctaccacttttagcctgttacagtctgcaatatccccttagaaatgactcagtgatcacattattggatctcactcttgtgaaaacctcctaaggcagagagaagtcaagttgtgcagaaagttatcacctggcactgatgattgatcttaggtgtgacattttgttcctcttttcttatccctggatctctttcctgctatgtagtctccatacacaacaaactttaacagcacattgaggcatgaattcatcaagcatcctgtgctccctcacggcatcagaacaccacttcccctctgtctcctgacggtgagctcagaaattaactcacaataaggtgctgatggctaatttgaagttaatatgtaacctctctcaaaatgatgtggatttgaagcagagatgtgaagagaaaggcaatatatgaacatgaaagaaacaaatcacctccactggtcaaatatcctggtagatgtctggagacaaaccgtagggcagaggatatatttatatttccttcaaattctaaacataggctggtcctagtgagagtaaacaaaaacacatttatcatacttatcaattgagttattattttaaaatatgccttccacaattaagttgccttgggtggatttgtgtaacatgccactaaaaataccatgaaataaacataaataagctaaaattttcttagccttaaattgctgttctgttttagaataatatgggcagataagctccacagcctccaaatcaggaattagatgtgttaacagctgtttttaaaatatttttatgttaagggaaatacacgtaagtgtacatgaaaatttcttgcttttttttttttttttactctcgctataggttttactccatgtacatatcaagatggatatgtctatgtaataaaatatatcatatatttacatatatgaatacatgtatactgggccaaaagcaatgcaaaactaaggaattaaagtctgccttatctacactttcctcttctttgctatgttagcacaaatgtacttctcatttgagggaacatggtagaggagctgccatcccatcttaatggtacttgatgatgccattgaagagaagacatactatttatttggtgcttagcatttagctttcttgatatccatcactgctttacattaccctcagagacacatcactgaatacagttttgaatggttccatgctatgcatgatttttatgggggtgcactgagctgtgcagtctgcagccactgcattccaaacaaaagaagtaatcatctagacacagagaaatgggttcattgccaacatggaacaggaaagattcaatattcatgtttcgacagaccacttaaccagtgttttcctgataacacggtgctagaacctagtagatattcaatcaatgtttgttgaatggataaatgagtgattgaatagatgcattaggtatcttcaattgggtctttctttatctagatctttaatataatgcagtctatggaagatggggttatagcaatgtatttttaaattgacaagtattcatgtttaataactttagttaaaggaatcataaaatcctcaaatttatacaaatgataaagtttttttaacttatacctagtgtgaatttttaaatcacttaataaactgtaaaagtttattaagttgtactaaataatacgatgctcattttatagatttttcaaattgcggcatgtacaaatactggttacataacttgcttacccactggccaagtaggtttttgctctccctttctcatatttctgctccctaagtaaaatgttacatccttgcatctttcatttccagagctccaactctctgcctccttatttctgattagactagcatgagatttcctttcttcccatattttgtgttccatgcattcacagagagacagatcttagcacctgaagagaccttagtgatctgcagactgacttgcttcttgtggtgagaaaggtaccatctttactatgttacagaagaaattcccaagaggcctagagtatgtaggattcacatgctggtgtgaatagagaagaggatgctagaccttcaggatacttttttcttcttttcttaaccaacacattttcactggaggcttatttatctttcatttctataggagtgataaaactgaatgttttacaatttcattcggtagatcaaagaagattcattgaatgttttctcctgtgctttgggcacactcatgtcctgttgtatgtgtggcggaggtgtgtgtgtttaaataacagatgaccctttataatgggtacagaagatagataaaaattgttagtgtattagaactttttatgccaatgcttatttttaattgaaaaaaatacagtgaagaatatattatacatgtatataatattggttttatttttatgataaagcaagaaatgtagatactaaggtgtgttcaattaaggacaggccagatacaaattttcctgcagcttgaaaatcttgtctacatatcctaagaaagcatcttctgatattgttcacgtaggtagcataatgtcctgaaagtcaagatgcctgggtcttttatctggtgctagtattgccgggtgggagattgaggcatgaaataggtcgtcattaaggtccattccagctttaacaagctattaatgaaatgttgattgtcaaacagaaaatgtgcattttgttggttgacggagccacatttgcataaggctgccccaaaccactctgactgttaataaatgccagaggacttgcagcaaatcaaaacacaagtgctgctaaaatgaatttataaaaaaagagtgattattttgcttgaaaagccacagggtggcctgtagaatctaatgcagggaggctctgagaatatatgagaataaatagtaacagtgttttctgagcccacgttgtaaggagaatctaaatgatccagtatgttaccctgtcattttccacttgcaatgtagacagctaatttttatttttcagttttcattttaaaacaaaaccaagagatgatgactgcagtgtaagacttactttcctgttgggaggaaattgcactgtgggcatgatgtctttaactttaacctttaaaaggtataattgacttgtagtaattttaggttaaattatattgtgctgtgagttaggtcacatacaaaacactccagacatttattacggatatgttaaaagtttgttagattttatttccagaggatttcatttaacagatttctactctatattatactcgatctcctgaacaatattagaaacagaggacggaccttgtttctcttttgaattttctgcttccttcaagccatcattgttgaccctaaagaaaaaagtccacttcatattagccttcttggtctaccacaatagaacatcacaaactagtaacctcgaccacatataattatctttttacagttctgcaggctagagatccaagatcaaggtgctggcaaggttggtcttggttggggctttcttcttggcttgcagatggctgccttctcactgtgtcttcacagggaagagagagagagctctggtgtttctttcttttcttataaggatacagtcctgttgaattaggactctactctttttttaacttttattctaagttcaggggtactcgtgcgggtttgttgcataggtaaacttgtgtcatggggggttgttgtactgattatttcatcacagctattaagactgatacccattagttgcttttcctgatcctctccctcctcccaccttccaccctctgataggccccagtgtgtgttttccctttgatgtgtctgtgtgttctcataatttagctcccacttataggtgacaacatgtggtatttggttttctgttcctgtgttagtttgctaaggataatggcttccaaatccatccatgttcgtgcaaaggatatgatctcattcatttatggctgcatagtattccgtggtatatatgtaccacatgttctttatccagtctatcattgatggacatttaggttgattccatgtgtttgctattatgaatagtgctgcaataaacacatttgtgcatgtgtctttataatataatgatttttatttctttgggtatatacgcagtaataggattgctgggtcaaatggtatttctgctcttgggtctttaaggaatcaccacgctgtccttcacaatggctgaactaatttacactcccaccaacagtgtgtaaacattcctttttctctacaaccttgccagctcctgttattttttgacttttcactagtagccattctgattgttattgaatggtatatcattgttgttttgatttccatttctctaatgatcagtggtgagccttttatcatatgattgttggctgcatgtatatcttcttttgaaaagtgttcatgtcctttgctcacatttttatagggtcatgttttttttttgtaaatttgtttttctttatagatgctggatattagacctctgtcagatgcatcatttgcacaagttttctcccattctgtaggttgtctgtttgctctgttgatagtttcttttgctgtgtagaacttctttggtttaatttgatcctacttgtcaatttttgcttttgttgcaattgcttctggtgtctttgtcatgaaatattttcctgtatctgtgtcttgaatggtattgcctaggttgtaggaccccactcgttatccttcatttaaccttagctagctactgaaaggctctatccacaaatgcaatcatatatgaggttaagacttcaatatatgaactttgcaagatgacacaattccatccatgacaacatttaaagctcatttacaaatgtaatctctccctttcacaaatatcttaattcaaaagctgaagataacttcacattttattttccagtctgactccagttgtaaaataaaacattagcccaatggtttcttccccctgaggatattctattctgatatctaacttttaaatatatgttcacttcttaaagtagagggataatagccaccatctgttttcactatcttacatatgcaaacacagagagcttacctctgcatctatttgtgaagggtacacagttcttcaaatgaaacctgtaaaatgagatataatgttttacattattctggaatgtcctcttaagtttgtaaaccttaactcattaattcatgcgataaattgttaataaacacttactctgtgtcaatcactattctaggcattggtgtgacaatggagaacaaagtttctccctcaaggtgctcaaaatgccctagtctaggtaataaaatacatggtcacacttctcgtgcagaaaaatctccttttctgtgtttattgttttatgtcatctttttttttcttacccctcataactaagctcagtcatttttgctgggaaaaatattgagaggaaaatgaaatgaagtgtcttataatgtgctcatctgtaaactgatggatagactagaacagtggtcttcagtcctagctatccattagaattacctggggagctctaaaaatataccctacctgggccccagggattctgatttatttggtctgtgacatgtcctgcccatgaggacatttaaaaagatcccagggtgatgccaatgcacagcctgaattgagacatggaatgaggtgatcaccaagattcttcattgatctcagtgtgtgaattctttggttttctgcccagatgtaaaattatgttctagaataagttggaaaagtcattcttgttcctctgtatgtgtgtatcctaggggctattagtgatgctttcaagaaaagcatatctgggccgggcgcagtggctcatgcctgtagtcccagcactttgggaggccgaggcgggtggatcatgaggtcaggagattgagaccatcctggctaacatggtgaaaccccgtcactactaaaaatacaaaaaattagccggacgtggtggcaggcacctgtagtcccagctactcgtgaggctgacgcaggagaatggcatgaacccaggaggcagagcttgcagtgagccaagatcacaccactgcactccagcctgggcgacagagcaagactccatctcaaaaaaaaaaagaaaagaaaaaagaaaaagaaaaaaaaagcatatctgcttggctctaatttaggacaactcttttgtcttttgatttaaataaaaatcacaaagatcaaatcaaattaaatttgtataaaattcaagtagtttacatgtagcatgaagtgaggggagtgcagagaagggtgggggtggcatgatactgaactgtacagctaaagaggcgcttgtatatcactctaagtgcttccgagtttatcttaatgatgatggttttgccattgaaaaagtattaagaagtggaaaacataaagagatctatgttttggaaatatcacacgagaaagacagtggaaaattgctggaagaggggcaaaaccaaagacaaatagagttcaggagagaggcaatgctagagccttagtttaaggaaagtaaagaaaaaaaataaaaaataaagcaaacagagaagtgggcaacaccttgaacaaactgacactctgcaggtcaatggagaagagaatttcaacaagaaagaggtggtcggcagcatcaaactgcatagaggccgagtaaaaattgctacatgtattgagtaccgaacaattttctaattgctttatgtgtattaagtcacttaatttgtataagaactctggaaggtagctgttattatcaactcattttatacaggaggaaaccaaagtacaggtggtattgtgccaaagaccacacagttcgtaaatagcacagtgagagtgtgaatctgcaggactcaattccagaagccatgcccttaatgacctgcgaaatgcctgttaggacaaagaacgaggactatatccacccttcccgctttacagtctcctatccattgtatcactctgtatgcctttgcatacccatggcttatttctcaaagtgagaacatacggtatttgattttccatttttgacttatttcacttagagtaatgacttccagctctatgcaatttgctgcaaaagacatttcattcttttttatggctgagtagtattctatggtgtatatgtaccacatttttaaaaatccactccatgggtcgataggcatttaggttggttccatatctttgcaattgtgaattgtgctgtaataacatgcaggtacctttttgataggacttttggaaatgtgcttttttaaaaaatatctcatgtgtgaaggaagggtacacaataaggtggtacttgagggtgacttagcataaaagtataattatatttgaagttggaagagatggaacacacttatagtctgttaaaaaatagccaagaggaatgcaaaagatggaggtacaggagattagtcattaaggtagtttcctatgaagacggaggagaggggaaggaatcagtttgactatctcttcctgggagataggaggaaaggaagggaggtgggaaataacagcatttaggagtcagaaagctgtgaaggagcatttacccaagaccactttcattcctccctatgaaatgagtggtgcagggcctgcccagaggatgggttagccttccagtcatatacatgacactgatccaactttctcaaaaggcatggatgttgctaactcactcaggttgcagctgtctttctcagtcagagtattcttcaagttgtattcgtcaaattcagttaatattccctctcccaagtaaggagaaagtaggttccaagcaaaaacacccctcagtcaaagaatagcaaataacaaccttttgcatagcttgtgttcagagttacccatgaggagtctgagattgatttgccattcactgctacctctcagtgtactgaatgagaagagcaccaatgggtaacatatccagtcagattggcagtgatcagcctgtctgtggaaaggatgtgaactgaattaataatactttgaactaaagcataaagaactttggagggaagatgtcttcaaatgaaatcccaagtgtacactttctccacctcttacttaacaggcggagtggttgcaaagggcaacttcaacaactttccacagcagcccagttactgtcagtgttacttgaaaaggagaggggatgtgagttctacagacagcacttatcccctgagacataggcacggctttcgtgttcaatcactgtatttaattcaattatctgcccccgccacccccaactgtctgccttacaggggaggttgggaggagagtgatgcttgatgcttctgcaagtcccaaaagatatgcattctttattagggaattcaatgaaggatgagctcttactcacccagctgcttcctctgggaagtcgtcatgcggctccagctgcctgcagcaggaggatgacatggtctgtgcaatgcattgaattttattttatttttttttagattgaattcaggtagttgtttgttttaaagagggcttattttaattcatctttaaatatcatatttttgaaggtgaaaaccatcacaaagtcctgttcacctctagaaatttcagggtccggttatctagacagttatagtcaggtctaatgattttccctcttttctttctttgttttatctattcatttgttggctcgtttcaagggatgattaggactacttctatacaacaattgaggtagagaagaaatagattacagttcaactaactatgttaattttatttttagcaataattctaataaaataatgcaatttttaaaattgtgacattttcacagcaaaaaattttataacataaaataagtactaaatattatgaaaacttatattttcttaaactaataaatgctcactctgtcaataaaaatgagtcattcagtggttaaagttctcttaaataatcaaaacttgttggttggtgaagaaaattatctaatttatctcaagaaatagttaattcataaagtgaaagaaaagaataggccatatcagagaacttcaattgaagaaatctaggctaatctgattttttcattaataagtcacaaaccttctaattgtttcagaaaacaaacatactgctatttttttttttttttactaaatacaacaataatgccaggaaggtatattataagccggtattttccaaatttgagcctatacatttttctttaagaaaagaaattcccagacccagtaatatacactctctggattttgagaaatactggctaagactttcaaacattccttgaaaatatcttttagcttcagataatcacaacaaaatataaaatttatctttatatggtcaaaattattttatattctgattttggtaaaagctaagaggcaaaaaaccaaaacctgtagaacttgtggacctatgagtttatacccatagactcagtttgaaaaacactacttgatggctatttaaccaacactagaactttttgacagttcttttctttttcatacatgtgttaaattgcctctctctgagccttatatttaattcagttcctgcatcctcctctcaagttttcttcacccttgtagaatctgaacaataatgaaaggattgatgacaatgagtatcttctgaaactctttacctaagggattggcaggcctgttttcttttccattctgattggaaaaaaaaaaattgtcctttgaaaattggtctcattaggagcttatttaatcacagatatgtctctataggtgttgccaacaatatatatttattgagcatcagttaaatgtgagattggtacaattaatgttctacgcaatcaataatattttttgattagaagtagtatacatctttatgtataactcactataagtttactgaagaggacatttaaaacatgtaaatttacatttttcttggcatgttgagtatgttgatggaaagattaggatgattcacatcaaaagataattatcaatacaagtaaatgagtaatgaaaaataaacagttatagatgaataatggagagaagagtttggggaagtgaaatttaagcaggatcttgaaagaaaaatagaattaggatagaagaaatcgaggcaagaaggcattccaggcaggaaacccaaagagttagagatgggaaattttatttggaggacagaggttagaacagaaggctgaaaccagatgcttacataaagagctttctaagatagcttcaaagacactgattgctaaggactttggactcagttgctggaggtgttgagcaggggaccaaaatgaagaaagccatgcttctagatgattaaatttacagagggaggatagaggggcaggattttaaaaagtatggaacttgaaaacttaattcagggtattgcttatttttgttgtctacagtggtatactcacaagagggtatagacagagttgtttttcatttcgagccatttccccagtgacaagtaatgagggcaatgcagcagatgacaaattgaggatggttatgacactaagagtttctcttctaaggcctgcttctcccacaggactgcagagttgagccagggaagctaaacactgtatatcttctctacctttgttcattgcccttcttgcctgctccttatgtctcctgcttagggcagcatttctcagactcagcaatagtaacatttgggcctggataattctttgttctgggaggtgtactgtgcatgggagtatgtttagaatcacccctgcctctacctactagatgccactagcatcctccttaccttcccaagttgtaacagccaaacatgttttgagatattgccagatgtccccaagagcaccaaatcaccctctgtagagaaccactaggttcttatagattatcctgttgaatgttaagcatttgtgatagaagagggataatttcccttcttgatggtaggatcatgactaggctttcagctttatgaggactgtaggcatcggagaaccacaaatgtcaaacatgcagtttcagatgctttctccaatgacacatccaactttcaccctcttcttctccattattgtattgcctgataataatgtcaactctccagttaactaataatggatcatcagtatctcctggtttgcctgggagagtgctggtttacatctgttttccccatttctatcttgttagtaactccttttactctataaagtgtctggggttggaaggtaaattatatgatgattctaatatgggaaatcactagaatcatgagaaggcaacaagtgaatattaggaaagtaagaggtgaaggggcaatttgccctctagcttccccgggtaatttttcctagaggagacaccagagttaagacttgaaagcaacattaggagttaaccaggaaaaggggcaaagacatttacaagacaaagggaacattggatgctttgcagggtgagacacagaagtggacaaattgaagaggcagaccaacatgctaatataaaaatccaaaagttgtttttgcaaactttacttcaatttttaatctacctatcaaatttttatcctatctgggaaaatgggcagtgacatttttaggctataaattctaaatgtgaataacatttatcttttgtaaaagaaataggattgattgctataaattgtccaaaagagaagagggtcagttccctagctttgggtttgtgtatgtggtgatattgaaatgcacccgtcaccttcttttccttttatctgaatgtttgtaactaagacgtaactagagaagatccagcataccattacacatatagatttcaaagacttgggaagaaatcttatttcagcatctgtagctggttttattaaaagcagtttaaattcctctgcctagagcagtctggaattatagagatgggctgcagaaatttacattttaattgaggcagaagacaaaatagggcacggtgcagcattcacacattacaaggaagaataaataagatatgtatcagctgggagaaaaaaatgactggtcgtttttcattgcctcctgcacttatttttttcatatggcactgagctgagttaggcctgctaagcaaagacgatttttccagtcaaaatgtttactatttcagaaagtccttgtgttgaaatattttcacactatggaacaaatacacaaatactcaaatgggcctgcatttggttgtcaaagtgtgtatggcactgtttataatgtctcaaatgtctataaatataaataacatgtcccaatgagctatatagaaaatgatttaaagtatgaggtataacagaatgattgatagacataatctatctgttaaacactgtaatttgagctattttatagtttcatagaaatagaataaaattttatagaaatagaatttttctctatagataaatttcatcctttgattagtgtggaagtccctccaaagagtgggaggacttaggttttcaaacttgaggatttacctgtgtttggtaatcactttgagaaaccactcattggatttttcttttctattttttgttatatgtttggtcattaatagaaaattaagttgaaaattcatttcctcataagggaaaaataataaacataaaaagtgtatcatgataatggcttttaaaagtaagtctttgtattagtgtaaatatgttttgtagaaatccactgtaattaagtgtgtttatccatttatttaagccttcaacttttattatatcttctttcagctgtacgtgtatttttacattcatacatgctctttgccaatcataattattttgttagattaattatagaatttaaaaccaataaacaacacattactatagtatgattatccaattatgattccctccagagctaagtactataattggacccatagtaagaaaatgtaattctttttccccaagtatgtgcctctcaagcatgacggtcaaatagattatctacttttagccaccaaaacatatcttaattttctttattatttgactatgactttccattttgctttttctagaattttaaaatgacattttattgtctttaaaaaataataacatgcctttaccttatcactaagattacatatttcttaatcacttaatcaccacttaatgtcctattattaaagtgaaaatacatttttcttaaatatcattttttcccttggagctctctggttctaattcgtgttgatgattgttcggctctaccacgtaactgtcatttcaggatatttttcctttttactcctagtccattcttgttaggctatgcttactgtttttctctctgtctgcttcctccatgcttgggtttcctttttggtttttgtctttcatttttgatattcataagcaatgtttcagaaaggtatttgaaaaaatgtttgagtccttgtaaatatcaagcatcattattttcatcatacttacttaatagtacagctgaaagttcaaaataattttccctcagaactctgaagacattgctttattgtcctatagcattcaatactgctgatgagaaagatagtggcaatttaattctccttcctttgtagataggcaatgtttcattttggaagcttttacgatattctaggaatctttggagacctgatattatcggtaggtatgggtcttgctggccacttaaccgcataacaaccactgtattctaatgagtgccgtcaatttttcagtcacagggtatcttttaactcatttttttcttttacttttttcagccatcttatttactatgtctttttttttcccttaaaaccattattagatagatgttggcatcctggattaattctctatgtctgttaatcttttcttattgtttctatttatttatcttttggctcaatgcaaaatgagattcttcaactatttaagcttttctactagtttcttactgatttttaagcttcaagaaccctttcttcttggacttctccctaaaactctgttctggttttatagttacagcagtttcttaaatcatcaatgggactattataagcttctttcctgttccttgcattatcttaatgccttttagggttggctgttctcttgggttaccttagttcctttggcctttgttattttctcaaggtttttagtaatcattgatagttcattcatatgtatgaaataggatgttaagtaatgtctctgtcaccatggaaaattttatccccaaatttctctctgctccaaagtggggctgaccaactaggttggtgacctggctgctttcactatggagttctaggaggactagcagtatgttggaagcttacagaatgagaatgacttaagtctcattcctacctgcgaaaatcattaagtttctttagagagtagtatcataattttaggaattaggagaaatcttattggtaatgatgcttcagcagggaccagacagtagtgggcagcgaatggcccagatatttcttagacagactttcctattttcctgcctcactttctatatttactttaaatctctgagtcttagtcataaagagtagctcccacctcctaagaggctttgtcctctgaaagttttaagtcttagtttcgcctgctttgtttaaaacagaaatatgttcctcttcttcttctctcttccatatatctatccaaaaagctgctccattgaggcctagttatcttctcaacccagtcttttttcagaactgttataagtttattggtttttatttttctcttctaatttcagtaggatttttagaagaaggcaaaaaaaaatcctgtctgatattttgtagcagaagctatatatatacacacacacatatatatacacacacacgtgtagtatatatatacacatacatatgcatatatatacacacacgtgtagtatatatatacacacacacacatatacatacacacacacacacacacacacaaacagacatatatatgcgcagtggtgtgatctcagctcactgcaacctccgcctcccaggctcaagtgattttcctgcctcagcctcccaagtagctgggattacaggcgcacaccactaacacctggctattttttgtatcttcagtagagaaggcttcaccatgttggccaggctggccttgaactcctgacctcaaatgatccactggcctcggcctcccaaaatgctgggattacaggcgtgagactccgcgcctggcccagaagcaataattttaagattaaaaacaaaacccaaatatggtttcctccccctttctatctatactcacactctgggtaagaagtagcaaaagcaatcaggttttcaccagacaaggagctctgtgattctcagctctgtcccaacagcccatgcacaatggctaccaaaaacaaaaacaaacaaacaaacaaaaaaccccaacaacaaaacacagataagacaaaatgccaaaatgcaaagcactgcagatttccaagaaactctttggtttgcaggcctagtatgagcaaattttttttacaacgtaagaccatccccttgtgacttcatcatttgttgaccacacaactgctgccaaaccctaactcaaatattctccaaggtaaaacttggaaaaatacttgggttttggtccatgattaatcttcatctatttctatataggttatctcattatatcaccattaatataaagcaggtgggttacatatctgaggaaatgggcagggggacccaaatggttgagttgcaacagagcccaccactgtagttattcacttcatctgtgtatgtagcttaccacattcctgggaccacaagcatggaaacttagagcaatggtcattgacttttttctcctctattattctcagtgttgctcctgaattctctggcttaccacactgtgtttcaactcacataacacaaaaattatttccaaactgtctgcacaaatgtatttcatatacttattccttaacctaatgcatttcattctactgaaataatagttttcccttcttatcaatattgcccagcaagaaactcaagctatttaaacagcaaagctgccaatatttacaaccttttaagtcagtaaaggaatttaggtaatttgtattttagtgtttactggttggttaatgaatattgtgcttggggttttatttatttatacagcacctcattccaaaaataaataatctgaaatgtcttggatattacagaatatagtatgcaaggaattagaatctgaatattgtgtgtttagcacatttttagcaaattagcttgccaggttggaaaacatcagaggtttatctgatgtaagcatattttaaatttctgggtgtttctgtaaaaaaaaaaaatcagtctttcctcttactttatacaattattaaacagagataaaacaaagtccatgtactgcagacctttctattttatactgaaacatccaaatgattgacaggttttaaaattctatttataaaaggattgctcctctgtagacataagaaaaatcatttcaaagagagatgctctataagagaaattcttaacatatttaaaaaatgagagactcctctattgtgtaccttaatctggctcttattcagttttctattgttatacattctgttataaaatctataataaattaagactccattgttttaaaaaaacatggtaatataagcattgtagataaggcattttgctctcaaatatttgtttctattagtttattttacttctgtttatgtgttgtgcatataaaactttaatctttctattaagaaggaaaaagatgtgacttatgtatgatgaaatttgctgtaacctttatatatgttcttgaaggagccttggttgaaaaaaatcacacacatgtaattttttgtgggctatgcaccatccttatacatactaaatattgcattgcaatatttactattagctatgaattgacttgtaaatggcaaaacactccaggttttttacatggtattattttgaaaaatccaagcgatatccctttatcattactacaatgttctaactttgacaacctagaaaatagatttttttttcaaaagatacataacagagaacatcccttctatttgaaatctctttaaatgttgtggttttaaattcttataaatatttttctttaattacagtgagtggagggatagagagaatagtttaattcatacaatatccacctcccaaaataataatacttcagattatagttttttaatcttcagaattttgaccacaattttatttattaaaaaatatattttataagattgtttccttggctgggtgtggtggctcacacctgtaatcccagcactttgggaggcccaggcgggtggttcacttgaggtcaggagttcaagaccagtctggtcaacatggtgaaaccctgtctctactaaaaatataaaaattagccgggcatggtagcaggtgcctttaatcctagctactcaggagatggaggcaggagaatcacttgaacctgggaggtggtcgttgcagtgaaccgagatcacaccatggcactacagcctgggcgacaagagggagactccgtctcaaagaaaaaaaattgtttccttgctgtgattttggtgaagttagtcactgaacattggaaataaattgcaccttgcctcattttcttttcttgaaaatagaataaatatagataagatatgaatctagagaacacacacatgtactcacacaacaacacaccatttctcccttccctggcaagtcaggtttcttttacaggaatggtaaaagttataatgacataatgggaattctccatcagttaataaattagatgatgaaactaattctgactgctactaggactggagtagcagaaagcaatttcaatctatcaaagccatgtagggaccagagatgggggctatggctacagctccagtacccacatgtccactcactgcacaggtagagacagaggtctgcagccacttgtctatatcaggcagcatctgagatgtaaaaagatactgcctcgattttggttaataccactttggaatatgaaataattactggatctccagcacatgtcttctgggtaagaaggaaagacactatattctctcattttacagtgacaaaattaaagctgagatgttaccttattctttcaagcaaccatagtaagttggtggtatacgccagagtagaacccagagatgctaattcctaagcagtgatcttttctcaatactagattattctcttgtatcctagataagatagttaacatttaaaaaataagcaaagcgggcaggcgcagtggctcaccgcctgtaatcccagcactttgggaggcagaggcaggcagatcacctgaggtcaggagtttgagatcannnnnnnnnnnnnnnnnnnnacaaagtcagccagttgtggtggtccatgcctgtaatcccagctacttgggaggctgaggcaggagaattgcttgtacctgggaaccgggggttatggtgaaccgagattgcaacattgcactccaccctgggcaacaagagcaaaactccatcacaaaaaaaaaaaaaaaaaaaaaaaaaagcaaagctccttttttgccacaattacaaaaatgatcaaagagattgtataaataaattatcagttttttcttgcacacaattctcttacccacatgcaatacctagtttctatccaatccccctaagcatgtattgatattttgaagatcacaactggaagaatagcttatttgtgttaaattgtgtaaaagaaacaatttttatagaaatacacatagaataaagatgaaacagaccacagtgtgccagattcatagcaaaatattattttaagccaatagaagaaataatagtaggtttaacgaacatctttacatatttcagtgtgccatgcatgagccaatcaattaatttaatccttatgaaaactcttgataagtattaattttcctagtttattgacgagggcattgagccaagacaggttacataaatcgcctaagttcatacagctagtaagcggaggagacacaattcaagcccaaggatttacattagtgcagataaaatttgtcaaagcttacctacatatggctcgattgtggacccatctcattcataacaccttatcgatgtatcagatccacactattctgttgtttctgttgcaattgtagaacctgtggcatatagcagcacagtttaaactcacaatcatgcaattggtctacctagtctaatttttttaaatttatctttttttgttttaagtaagtgtcatctatttagcagtctgcaaactttttagaagtatagatcttatttttctttgatacagcataaaatccaagttatgttggacagagaatagatattaccacacacttattggcagattgaagggcgtattaggagagtaaataaagtgtgagtaatagcagatttggttgaataaggctgtacattctggctttctctctaagtggtttattctgccaaccccaatgtctcagctcttaggctgaacttctgccctttcctctgtgaatccctcttcagtttctctctctacatgatttcacccattccctctttgtgaaaacttctaaaacttgtcatcccatcttattccctcatttaccctctcgattggtactgcaggatgcttcctgcttaaactgatcatatctaaagtgcactagttattttatctttatggtaacattcctgcttctaatctacaatgctattcagtctaacatcaccatttgtgagaatcctggatgagtggtcatttggatgaattcagcagatctttatgaacatttatggtatgccaggaactgtagtaagtgttcagtacaaaagggacaatatgttaccatttcttctatagctagcagctaaacaaatcacttattataacgcaaggtgggatattttaccatagaagtctgcaagggatgctgtgaaaattagcatttgcacttgcgcagctctcacaatttaagcaattttgaatgcaagtttaatacaacctcatgaggtgttattattatagtctacaggttctggaaaccaactgacttgcctaagtgctccccgccttgtccgccctttatgcgaatggtggaagcatgacgcttagtcattctctgtttccttccccatgggagaagaagaaagcggttttgcagatgtccttgaatcccaccaccctagtcagtatagggctgaatgcacaggagctcccccaagtgtttgctatttgataagcagaattaaatgcaatgtgttgtgaagacagattgcagctcactgtgagaattttcagctagcctgtttagaatagggtggatttgtctcatcctctagaagtgctcaagcagtttctgtagaaaccgttttggggagatgaacaggttttatgcatatgatgggatatttgtataagtgacctctgagtctccttccaactacacgtttctctggttaatttctttatccagttcttctacggctatagactgagagcttatctttccttaaaagatgccagataccacctccttaagccactgattcttaatagataaagagttgctatttatgacagttgtgcaaactcataatcaatcagtacaacacaaggtatgtgattttattgaaccctccccctgatgacttaagacatctgtggctcatgcctctaatcccagcacttaaggaggccaaggtgggtggattgcttcagggcaggagtttgagaccaccctggccaacatggcgaaatcacatctctaccaaaattacaaaattagctgggtgtggtggtacatgcctatcgtaatcccagctacatcgggaggctgaggcaggagaattgcttgaacccgggaggcagagcttgcagtgagccaagatcacaccactgcactacagcctgggtgacacagtgagactctgtctcaaatttaaaaaaaaaaaaaaaaacacatgtgaaatgagtttattacaatcttcagcatggtgcaatatctagttagaggactgagtccagtaatcagtcttttttttctaaatgattgttctagttgccataaaggtaagttaaataaagttagaaaatatctctgacaagaaaaggacaattattttgtaacatctattgagacccacaaaacttgttgaaaagtggctgcaaggcatgatgagttagtcaaaggcagagggataagaaaagttcttaactggttatagccagttttattttgtgtagagatttttacgtaggatgtaactccaacttactagaacatttggcaaaggtacaataatgtgcttggcggtggaagaaagtataggaggagcacattataactctagaatattctaactcctgtataaaacacaatgaaaatattccctctcacaacaccacactggtcacctctaatattaatggaatgtctgttaccatgaacatttaaatgagaaactcgggttctattattgcctcatgtggttgtgagtattggctaaggagactgtattgtcaaaggaaatttgggatagaaaagggtgtagagttatgatcttgcatggttcaagttcagacttggacagagacaaaaagatgaattaggtgagttttttgaattcccaggaagtaatatggattggggacacatagttctgttttcctgggtgcatatttctgctgtttcagtgataaaattatagcttctactttgcgggaataagtaactaatagttctcatttttataagttctgagaattttctatgattttttttttcatgttacatatctgagggacatactctccactctctctctctctctgtaatgtggattaagataagtaaggagttttcttagaattagggcaagtttttaagcaccatagcttattttgccttgaatgatcaggcattgcaccatgagaccttcttataggtatagctaagttgagagttgcccacactgacaaaactatccagctcagttatgttaacaaaaaaaggaatctcaacttaggtaagagtagccactatgtctcaggaatagtcctattgcttaactctcttacaaaatgctaaaattaacattgcccataagattttctataaaaagcagccatctagatcctttgagtttcattgtttttctccttaccagttgaatttattgacagaatactctttttaaagaccatccttgagagtgaattaagtaacagattcttggcaaatctttctcaaaatttccaccaatttaggaatgtgaggaaagttgggggttgggggaggcagggggtaaagtggcaatttttattccaattacttgatttcctgagaatagaaagttgccttaaattaaacaaggaagagaaaaacccatgcatcaaataaattgaggaattcatttcataccaggcttatattttatgctcagtttctggtgggatatgaacgtacgattctcatacttcagtgagtcagtgtgttatgtaaacatggccttagtggcaattactattataaaattggtgatagatgtagcttttgctttactgactgcaaattaaatttagttggaaagataattctagttaaatgttttaattagcaaccttttttgactattctatttaataacaaagatacttctggtagcccagtatgccaaatttattttatgaactcttataatggatcaaatttcacattgcaaagagatctgacaagcctgattgtcccatgatgttttaatgtttttggacattcataggcaattaagtttcttcttggagaatgggcatacgtatggttaaagacatcttgagattgatttttttctctaaatttgtcatttattcagtaatagtcatgccaataacaaataatattctcataacaaatactaacttctctaacaaacataatcctcaattgtattttaaagaaactaacagcattttaagatattaaactcctctatgcaaagagatgttaaagcagtgcctaaattaacatgaatttaataggttattaaacccagcaaactggtgttaaagtggtgcctaaattaacatgaatttaataggttatctttcaaaagatttaagaaaacaaatgcctctgttttcagctatttattgctttgtcaacatctaatatggacctagaactacataagtgactctacagccgaaaattccttagtgttttgtggcacgtgtcaggcttcttcttatccaaaggttaagtcagcagatttaaagtcagcagcaagaagcaaactcggatctgacttttatgccaaatcagctacttactagcagccccataatcttgagaagtaacttcattttgaggcagttcggttttctcttttctaaagttttgaaagtaatatttactattgcttgattgcagagaagaaagttttttgtttttttttttctaggcctcaaacacagcgattgtgtttggttaatatttcttccattttctggctcttccccttccattccctctccttactaccttgtgaaggtcagaagaagacctaggtgaacagagcatactttctaacatctcaaggctgtagccctagaatggtgtctccagcctccttaagttctcagttggaaaagcttaaatctgccaaagatatttactatcgtaaattccagctaacatctgaacataaggcacctttctttcagtctctgtgggaggagaggagcctaacttcagtaagtatcagttagcaaacccaaatggcctagtcacctggactgaaccccctttttgcccttgagtgccttttccctagcactccccagctttttgtttctgtctcctgctttttttttttcccagtgaagttgcattcagttcaagtggactctttcctctatttttcaatagttattgctgagtaaagactgttcataccactttagtgtccagctttgtttacctttgacaccattcagaagcgtttccatatttgtcatcatgttaaatgggagcttggctgtggcagggagatggacaagaagactacgtcattaggagagcatgtttagtactgcatagcgatgtgtaatagcgtaaaattatgaagtgcatacagtgcatacaccatacagtgccactcaacctttagtattttaaatcttcactttaagaagttttattttatataattatatatttttctctaattatattctaattatattgttgtttaaaagaatgattctaacaattctcaccataattgcatgtctgaggaaaagctacattaatcttttgaggccttctattttggtttaggggaattatgattgctttcaaagtaggataacaatcttttaggggactgatttttggatatatttatcaacacagcctaacttcacattcattaaatatttttgagagattgtatgcaagcagtattcttcactgataatttatttcaaattccagaaatttttcaccctaaatctaccattgtttttctcagtacttttatgttgttttgtgttgcagtcactgataattgctatcagaaccatgtataaattgatcaaatattgtatgagtaaaatatttaaaaagtaaaacaaaatgtttctaataatcatgctttgaaaaaataagttcaccccaccttgccacacactctacttgatttatttctcttctcaaacacatcacctttttctttttttttttttttttgcctctctctgaagttagaaacacacacacatctccctctcgccctctttctctatctctttccctaccctgctgaaatctaatttgactaatgatgtcctaagctgtgaacattttgttagatagctattttgataaagacacacagcaatcaagtattaactggtccgtcaatttatctcttgatacaagtctcagactccagaaaaggagctaatgctcatccttacacgtttgtatcccttctgcctagaatattgcctaattagaaaacaaacaaaaacaaaagccaaaccattaagacattatttgttttgctgaacaaaacaaatatacaatgtatccactgagttaaacagggaaggtacaggccacatctgcatctggagaaggaaattgaggaatctcagtcctggtgacccaccttgatcttcacctaggagctgtctctgacagatatctacaagcctccatcccttcatattctacttagaattttgttctttaacacagatgtagatagatttttggacttctaaatatgtgaatagcacaaatctgggtaaaagagtttgtccaaggaagacttattcaacattttcaaagatcgtagaaggctaaaatatggtttgaaattacctagatgaagtgtaatagacacataaaaacctaagtctccattcaggattcacatatgccaaaatatgataggacagacttgacttattagcagttagtgtgagaacttgaagaattcttttaattaaatgtaaattttagatgagccattttctgccacgattgtggatttgaatctaagatgtgcattgtgcagtatggtactccaggtaagaaagagtctcatattgtttgttctacaggtaaaaacaaaacgtgaacatagaagtgccttgaaaactaattttacaaaggtcagaacaatggcatttataccaagtgcctcatagctagattttgtgtccaaacgagtattcgcagttttttgttttcaataggttcatttgctcctgtgtgtctttatgatattctttctagaacgctttctcccccttgtcacctggcaaatttcaacatcaagacccagctcagacatcacctcctcagagcaactctctgtaacctcagagccactcagccataacctcatctctcaggttcaacccttctgtgctggaaactatatatttattattctatttatcaccatataggcctgtctattccatcagacctgtgctgtccaatgcagtagccgttatctgcacatggcaattaaaattaaaattaaaattaaattaaaagttgagtttttcatttagcttgccacatttcatatgctcagtggccatatgtggctagtggctatcataatgggcagtgcgggaatagaatatttccatcactgtggaaagttctattagcaggaattgtgctatagtgagatccatacagaagactttctctccctgatctctccaacctcatcatctggggttgttcctagcatatggaagacagtaactaagtactgaacacaactgaactaagaaatagtgggcaagcttatatggaaacagcatcacactcagaatgcatcgctctagacacgagcataaaatttctgattcacgaaggtagatttctcttaatagacttactgggaaataaaacaggcttctttttagatattgagctcaggccccaaaatctttccattaaagccaagtaatcacctgccaggactccagtataatggatcccttcatggggttggaaattgcaactagaagagaataattgagattcagtcattctcgtgaccaatgtttgagcaacttttatgaaactctagagaaaattttgactacttgtcacgtcagcccctgactgtcaacaatgatccttgctttgctgagaatatctcgaatgtgtacattgtttttccctaggatcacttttactgaaactaatgtagctctaaaattttatattagtttttaggtttgtgtgtgtgtgtgtgtttgttttacaagaaaacctgtctggagtacaaaactgaattagcaattaaatcgttgtcaggaagcaagtactagccttaataaacaaagtataattgagaaaacaatgtcatatcagattttggcgtcattgactaaaagggagtgtggacaaatcacactaatttttcagacatctgtgtttccaataactgaactcagctgtatttggggctatggacacagtgagtattcaacagctattgaatgcaaagggactgaatgtaaataggtctgctttttaaaccacttctgctttgtgcagtgaaagccctaaagagctgttggaccaattaaataatttgttttttcttctggggcaacaacattttttttttgtatttttatctttgtgtccaaagacagcatgcttctaactgtaaaacagcacaagctctacagacattaaaaagtagctcagaaatggggtgtttttgtagacacagagctgtttttgtcactgaagacatcaggcaaaaatgctcttttttatacatgaagttaaataacccttgggatagaatattttacttcatttgtggagggatttgtgcaccctttcctgtttagaagggggcttctgtgcggatggagcatggccagaggaggctcagagcaaagcctgagaaagggcttcagtgactaagaaagtgaatttgggctttaataaaaacactggccttatatctgacaaaatctgttgctacactagatgatgtgggcagttgtttttctataagtgagagagcttctagctctgctaaataggaaaataagtatcttccctttcaaaaccgtaagagaaatgatattgaccaaacaattctatttaggagagagacttcatacactggaccaattattatcatccataatttatgaaattattggcttaacacctgttattttttgagctgtgttatctgaaaagatatgttgaagtcctgacccctagtggttctgtgaccttagttgaaaatagggttcttacagattttattagttaagataaggtaatactggagtaggataggcctttaatactggtgtctttataagggaatacatagccatgcagggagaaggccatgtgatgaaagaagcagagactgaagtgatacaactataggccaaggaacgccaaacatcaaccaccaccaattaagagctaggaagaggcaagggaggattctacccagggtctcagagcaagtatagccctgctgacatcttgttttcagacttctggtctctagaaccgagacaagaagtctactattttaagccacccagtttgtggtactttgcaatggcagtccttggaaactaatagaatacctgaaaggcttaatcagttcaggttcttatttctaggtaagatatttgataaatgaaatgaattgaaattgattttgtaggatcatatagtaagcggtgccccttgatgatgcttcttcagcccccttcacattatcctttattgactacgtcagccttccctcattacttgccttgaaatggcgggggttgtaaggagggattgggaaacaactccctgcaattatacgtaaaacttggtgtctgcatatgtacaattttctgaggccaaagttctataggttttttcggtctctccaaagagagtctaagacctaggaatgatcctgtttttaatgctgaggggtcaccatgtttaggatatcagcttacattcttttttttttttttttttttttaacatccagaatccaacaggccaacaagtcagggacaggaactcagtcagagccagtcagagccagtaatgtgtcacagccagacaaaagtcagggacaggaactcagtcagagccagtaatatgtcacagccagataataacagctcatgaaaacccattgataaatgatgatgatttttcaaggtggtagttaagcacaaccggtattaaaattaaattatataaacttacacttgaatgcattatattaaaaacaaggtaagaaatgcttattactcgtcacttcctaattacttttagtacttttctcttacctacattctgagggtttttttcccatcgactgcatctgtgtgataggcgtgaggatgtgttactgtgcatctcttcccaactttatgttcagtgacatcaagttggtcggtagcttgaaatcaattgtgggaaatcagatcacaaaggcaatttgcaaaacgactcccgccaacccctaagcaagatagttggtagtatttccaggctaccactgattcagacttgactgattaatcacgcttttatccctggggtttctattattttggacattacataagaatattggactagactcaaaagatggccattgaataatgttcaatagcgccttctcttataggagagttcataagtttgtctaaaagtgctttatgtctagatgtgaactttaagaatataaaggagttgtcagtcctccaattacaaaatgttcagggaataaggtgccatcacctttcttataacttagcattaccgattattattttaaaatgaatctaaataaaaacgttcataacctcatcaagaccttttctcttctgtatcccagattttccatgattgagtagcaatttatgagaacagtaagtcacttttgcatttgaaaataaaacgttttctcttggataactttctgaaaagtttcagtattatctataagctacaagagactgtttcctgtttgattaccttaaactgataaatttctctgggttatttgaaataaatcatacacgtgtttttgttttctttattgcctttcttttttcccttagaagcaataatgaattttatctggatgagatatgggaaaagtccccctttaatcttaatttttctttggttatgttttctaggattggccatgtgagtgtgaccatatgatgagaaacttatcctggtcacctaatgcaaatgtttctgaaatttttctgtagtttaatcaacctccattgtataaaaactgtgtttacaactgagcaaattactggagtagtaaaagaaacattgctagcctttaccccatgaaaaacacaataaaaaatacttactttcatggttctgtaactcaaatagaaaaggagatgagaagatttttccaaactgcaattactttattgttaacacttagtgtctagagttggaagaattaagtaatgacactaatattgttcatctagccacatgtaaatgtgctttagtttcccagcttatgcacgtcttaacactatgtttgtgcttaagccttttgcattgtgaaatacagcaaaaagttttctgggcagtgtgaatgagagctaccatgtgatagactggcccaaatgatgctgtcttctctgggagggaaaaagtaatcctcatcatcacgaaatgtcaaatttcaaaataaaatacttttaatacatacaatacagaaattataaatgcccctgacaatacagaaattcacctgacaatacagaaattataaatgccccctttagataattcagcttgccgcctcttgtggttaaggtgacactgctgcaccacctttttcttatcatagggaaagtgacccagaatatcaaggatggtgagataattcacaatagactgatgagtactatttgacattttgtagattcaaaatcaactcatttctgattaaacaccacaactctgtgcatcattccttttttttcctctcagaattttgataataagcacatgccagatatttatttatttatttattttattatactttaagttttagggtacatgtgcacaacgtgcaggtttgttacatatgtatacatgtgccagatatttaaaagaaacgtttatttttgaatgagtgttagccttgaaaagacaaatgggagaggtcgaaatgatggaaagatggatttgcacctgatatattcataggcaaggctgaatggctctccagtgaggagctgtatcagcacagggtctttataaaagctgggagtggaagtggcaagttcctttgtgtttctttttttgatcccaacatattaggaggctgcctgtcaagactgcttgaaaaagaaaggaacctctacccttaggacatatattttgttttgtaggagccaagggtacatagctttagggggaaaagttggtaatgtgctgaaaacaaacctctataaccagattctaactaagcaaaaggaatgctgtcaggggtgcagaggtggaaagtgacttgacgtcctctccagtgtctcttcttccatttcctcagcaacttggcttctcaatggtcagaccctgaatgacttaattagaatgctgcaagaaatcaccatcctttaattaaataacagattattgaaggcaaatcattcgatacataattgaaaatgcgtgttaaactaagaggtcccttcctcttggatctgtaatacacattgaacttagtaacatggccctggggtcagtggcggagcctgtgtggatctaaggggagagattttggttgggaccacacagatgtgggaaaataggtcaaatactccctctctctcatcatctgtgtgctctctttgtaatttctcagtggtgttcatgggttttagatgttattaatcatgaaagttgtaaggtgcttggagatggtcccctttgttattttagaaagagaaagaagagagtggttgtccaaagactttctatacctatctcagtgcctgttgtagggataggagcctcagactccaatttatggtgaaggttttaggtagggaggaaaaggagacttttcctcccttttttcatgcatggcttaggaaaactggaagagacgaatctcaaaaacaagtttttcataatatcacagacataccatacacagagacgcacctctttaatattcaccttctgctaaggcatgcatgagtgattagtgttcatatttaacccattctgtgtctggcttcattttaatgtttgtgacagtcaaaggtctacaaggtgtatcaggcttttaatttttttgtatatacatgctacatacatatattttatatacaactctcatcaatatttcactcagctattcaccactacttggaaatgtcacttaacctcattgaatgccagttttctcattaacgaaatgggacaaatcatttattatgttgtataaaagtgaaattatttgccatgaagtgtttagaaatgtgtttggttccttttcagtgctggttttaagggatctttcttatggtttagggagtctgtgaaatccctgaaaatgtgtgaatgattttctgtgtatgtccaaaactactttttatatggagcttttatcagattttgaaagggccttagccctctataatttcacgtatcagttaccatttgaaggtaatccattttcagataggaaacatctgcatgttaatctttaataaattaatctctctgtgtgtatgtgtatgtgtttctctattttttcctcaaagcagcttctgaattggtaaggaattatttattcagtttatcacagttatcctgtgaaaaccacttctttgggtggcagaataatttcttaagcattgtcttttgtgtgtgattatgaaagattttaaaaatgcaagaatatacagaatcagagaccccagtgtactccccacacaacaataatacctcctaatttagaaatggggtgaggtaagatggtttctgttgcagatgaacttttatacattggcttctcaaagttgttcctcaagatctgtttttgtttgtttgtttgtttgtttgtttgttttttcttgccttccttccattatgtgtgattccctgtaccagtgcccagagatgcctgtgtgtgcaggatctggttattcctccttggatcaaatgagaagaaacacactttagagaagtttctattttatcattgctgtggtttcaatgtactctccaaagttcatatgttggaaacttaatctccaatgcaccagtgttgacaggtggggcctagtaagaagtgattaggtcatgagggctctgccctaacgaatgaataaatgttgccctcttgagactaggtttgttataacagtgaatttagccccttcttgctctcttgcttttgtgctctcttgcccttccacttttcaccataggatgacatagcatgaaagccctagccagatgggggcccctcaatcttggacttctcagtctctagaactgtaagaaataaacctctgttttgcataacttacccagtctcaggtattctgttatagtaacacgaaacaaactatgaccatagtaaaaaataattgaagcagttatctatttaactgaagaattcaattctgttgacattggaatattttaggaataactcattcccactcccatctttttcactttatattataggtaagtaagccaaccatctccaaattttcctatatggatattacgtcaggtaacacactgataaacacacaaagactgtgtttgaaatgcctacttataaagaatcttgtcgctgagcatggtggcttacacctgtaatcccaacactttgggaggccaagttgggcagattcttgaggttaggagttcaaggccagcctggccaacatgacgaaaccccatctctactgaaaaaaattagccgggcaaagtggtgcgtgcctacagtcccagctactcgggagactgagccaggagaatcgattgaaccccagaggtggagcttgcagtgagctgagatcatgccactgcactccagcctgggtgacagagtgagattctgtctcaaaaacagagaagaaaagaaagaatctttacttaatgtgtgttataattgtttgttggttatttttcatccctatcatcatttgggtttgatgaatataaatatgcatgtaatatactatacctttgcttcgcttattttttctctctggtcttccctcattaacaaagccctgtgtacctacaatgttggaacatgggttggaagtatgggatcaatgggattcctatagtatgttctatgttggcagttcattaaagaagattcaggggttgctggatgagacaatgacaaaatcaggcaagagaactcagataggattatttctgtggttgctattttagcatttttgcagtccacatatatgtgtgtcttcagtcattatgctttcatgctcattttctttatgttaatacaggaacataaaaataattttgctgacataaagatcacagaaaattcaaactggctttatgtctcatgacaaacaaatagaatttatcttctgaacctgctaaagtgagatttgtaaatgatatgagccataactgaagcatccagtcaggtgtctcctacctagattgattagagcaattattcttaagcatggcaatgctcatctcaaacccattcctctcctctgggtcaatgataagtataagacaagggtatacattcttaactagggaaaatgcaacctaataaaatgaaaaatgatggcaaaaatagaagaactagcaaaagagaaactagagatgtatttttgtgatagaaatatttcctgggaaaatgtaaacttggggtaaatatacatattctgctctaacacagagatgtggaactgaagaatcccacgtgaatgctaaactgtagatagataaggttgataacaatctgataaaatgaaactactgcatgttatactgttagttttgacttatataatgaggttggtcattcatacaagctaggcaggaaacaaaggcagatgtcaaactatcatgtaagcacagctgtttaaattaatttcatcattacctatgagctgctctgaccttgtaagttccgctgagtagagtacttaagttctgagacctgtcaataaatatgtggctgctgatccacttccaacagggcatgacatggtcataacgttttgcagcctcccgtttctacaaatggtaatgaccatggattccaaagagattgctttatagcatgtgttgtaccatcagaaatggtatattcaacagaagcttagtaatcactataggctgatttgaagtagatggcgaaccaaatctgtaagaatgccatgaagatttaaaaaacaaatgaacaaacaaaaagcagaaaacaaaactgtaaaaacccctggctgaagtttgtatgtactccaagctttatacatagaacaaaattatttgcatctggccttattggacttaaatatctagtctttgttggaaaagcattgaggttgaattataatggctatgataatttagggctgtgtggttggttacttgtagagaaacccaagatgacaatgataaattttatagtaaatttacagtaggtttagacgtgaatgtcagccaattaaatgagcaatcaaaccacaaatataattagtttcctttgaaatgccagctccatggagagccccattacttgacaaaaatagacaacttatagaagaaatccatcaaaatatattgtctggaactaaataagagctgaggtagcaactgtgtttattaaggagggaaacctaatttggaatcacagtgaacaattaaattttaagtaaaatatactgagagtcagtgacaagttacaggcttgagaataaaaactaaacttcctgtaatttttttctctgtgtgtatatatacacacacatacatataaaataatatataattacacaaactacacatttatttgttccaatatgtgaaccaacatttgggaaatttatgttcccaaaatttccattaagtagctacaagctcagaggcttaaggaccaggaaattaatatgaacattaacatgaagtgctcagtgttataaaatatagtagcaaatgatgggtgatagggccatttgggagctcaagacataaagtcattcccattcaactttgtgacctaaaaaccgcctttgggctcattcaaatgctggtgatttgaccagctgactttcagatttgggaactcagaatgaaaccattaaataatcacttaagccaaattcacctgcaaatatgctatgtaaggatgagagagattttactattccaagattgaaaatatgaagcaacaccagaatttgtgcataatattactaaataatgcttctgaatcacatagacatatttttaggactgtctcctgagaaatctgactataataagaaaatatctttttgtgatttgttttgaatatctgttgaaattgctctgctaatgaatttcattcaacagacttagatcacactttcatgtttattgatagcactttgctcagttatttcgcggacttgtggaccatttttaccattgatcactagtatctattctacttaattatagttctgttggtatctcagtaatttccatttaatttgcttccatggaagtggttggaaactgaaacttttaaacatttccattactccaagatatgtttctgtctggtagaatttatctgttttcaaaaaagaatatattctctggggaaaataattagaaaccttttttgttctacgtaacgggttcttgcaatgtaaaactttacttgtaagtgaattatcaggatttcaaatatatccatattaaatattacataagtgtaaaatatcttaagctgtgtaactttttttgaaatgagccattttagtaccattggccacatttctgaagtatgccattattactcaaaaactttgtaaataaatgaatggatgaatacactatacatacagctcttaatagaaattgtaaaatatacatttagaaaaaaattctcaatacatgctttatcagtactgaaaaaaggtactaattttgatttattcagaaagcaaaagcaatagtagcactggtttttaaacaggttacaaatgaatttcttcttgcatcaataatgtcagaatcactaattaaaatagtgtatattaaaactcacaacccgtatttctaacctgagaagtttagcttatattaaagaaggaaacatatctttcaacatacctgtaaaaagtagacctgaacatttaggttaagatgatgagagtagaatactctaatcatcatcattaatcatcctcatgccgctctgtggattcctcatctcacagtaccacaatatcctaatttcacaatatttgtgagtgctgggaggaattttatatatctgagttgaccatatgttgatcctatgtattgaagcatgatgtctttcttatttatttaaaactcagcctgaaaaacataagatgatatcctataaatgtatttataagcttttattattttctgatgcttgaaacccattgtttcaataaaagatggatataacataataaaaatcaggaatgttcctcgaagtccagaatccttagtcattatattaaattttccctggcattaccattggaagcctgggatttactctacatatgatggtgtcaataagacactaaaaccgtgtcactaagttggttatgctgaagtggtgtcagtggttctagatttagggtaaaaacaaaaaagagagaaagtgaaggcaagaaattgttaaaactctgaattcaggtttggaagttaggtgactttttttttaggccatatgttggagttttgtaccaatgcatgtttctctatctgtataggtcatggatggcggcataagtttgtctgttcttcatatatgttagtaacaagacagacaacatttttggcatttagtggttgtgttaaaatttcatgattagatatgttgtaaattttaaaacagcaatcacattttcagatactctgaaccagatgctcagcattaaaagtctaactttcccatatgcttcccctgcaggctaactcaattggaaaacctctgccctattggttctccaagacaatggcattgtcaccaatctaatcatgtcttgaactatattgttgaatacccagagtgatttctctaggtagatgcgatgaagcagcaggagtaactctgggaaatgcatgtgacagatgtttttaaaatcaaatccatcaaatattactactttaaattcactcaaaattgattagacccactcctgtgatcttgcctcatactggttttgtttagtttagttaatgttgcaattaatctctgcaaaaatctaattcatccccaagcttatttcatgccatgatctgtttgtgtaaatcttctgaagcaaaataccctgtctaatttgatctgttgtcatgattgaaaatactaagttgatatcgctttgtttctacactgatataattaaaatgcccacgcttttctaattaatctaatctaaaattgctttggctattagatatcctaatagaatgtaatgcattgttttttttcttatctctgtcattagtcaagataattaattttgccaagtttgaaacacacccaatatttatttgcatatttagatttcaatctaagccagacttctttgtcgaatattatccattactattaaatagaattactctaaaaagccatgttaacaacgttcaaagtagaatatataagaagtaatgtgttatttgcatacatactgtttacatttaaatatatatgtacataggtgtacatattcaaattaatatatttagagttaggcctaataaatataatatatttaatacaagatattaagtaagacacattatatgtaatactatatttaggtacatacataatatatttatatacccaaataattatttataatgtttatgatatactttctgttatatttcaataaacaaattaaatactctttacattacacactgtaagtaagaaatataaaaaagtaaataaagacttagaaattcagtaaatggccagtccattttggatatattgattgtcattatggttcatgtttagtttttagaaataagaaatgtgaatattttatcataattattttagggtataagaacataaagtggtggatactcttcattttaattgcttattttcaaaattgatattaaatagtagcacttacattacaaatgcaaatttaaattgcataatatattaaatttatacaaggtattaaatatgctgatgaagctactctttaaaaacatccctaaactcattttacaaatactctgactgaaagcaaaaacaagagtatgtaaataataatgaacgtgataatgttggttgtaagatattttgataaattgttgtgtttaagtgtgattaaaagcagctaatatactcaaagatatctgcatctcacaaaaatcttttaaaatattctatttggaaaaataatcctgtttttaattgcttcattgaatattttataatgtattttattatttaaaacacttttgaaaaaatataaccccatattttttagctttgactgtattttcctcctcatatttaaattcaatactttattttatttttcaaagggatatttttactgattttgcaaagagggttacaacttcagttcagaaatatgccttgtatagcttaaagacttaaaaagtcaactttttccaaaaaccatttttaaagaaatttttattgataataaaataaatgaatgggaagacttacaacattgagataaaattgctatgtaaaagcatttttaatggagaaattcattttgtatttgcatatgtttagagaaacatgcagtttaatttgaattcatagggattctgcaactaaacgacacttaggtttctatttattaagttcatgggccctacctcaatttttttttctaccaacgtattccatctccttcccatatttttcatattaacctatatggcacaggtttatccagtccttcatccggtcacatattcatattataatgattatataagctataactttataaatacgttacaaaatgtggattgttttgatatagtgattaagaagacaaaatatatggaaaactactcagtatcgctaggcatcatggaaatgcaaattaaacaatgctgaaatacccttaggcacccaccagattatttaaattaaaaagactaataatgcaaaatgttggcaaggatatggaagagctggtgtgcacgtatattattggtggaatgtaaagatgaagttatcactttggaaaactctttgacaatttcctgtaaatatatgtcttccttataaaccagcaattctacttataggtatatatcctagagatacaagtgcatcggtatataaaattgccaaaagaaggtattcataggagctttattcatagtagcaaaaatctggaaacaaccctagtatacatcaacaataaaataaacaattttgatgagtcaaaaatagaatactgaacagtaattaatgcacaaattgatgtacactacaatatgaataaatcttaaaaacattctgagggaacaaaattaaaatagttcctactctaaaaatatatttaagtgaagctcaagaaaaggcaaacctatccattatgatagaactcagaatagaggttattccagtgggaagattttaaccataatagggcacaaaagtttagcagagatggaaatgttttatctcttgattttgttggtgtagacatatacataaatatacacacacatacacatatgaatattaatcatgtgatacagttaagatttatagattttgccaaatgtaaattatgtcaataaataaaagaaatacagtgagttgttacttaattaaaattagagggtttttatcagcattgatgagactaaaacataaaatacataaagaccttaaaatcacaggcaacctacagaatgggagaaaatttttgcaatctctccatctgacaaaggtctaatatccagcatctataaggaacttaaacaaatttacatgaaaaaaatgccccatcaaaaagtgggcaaaggatatgaacagacacttctcaaaagaagacatctgcagccaacaaatatgtgaaaaatagttcattatcactggtcattagagaaatgcaaatcaaaaccacaatgagataccatttcataccgttagaatggcaatcattaaaaagtctgtaaataacagatgctggcaaggactcagagaaataagaacacatttacagtgttggtgggagtataaattagttcaaccattgtggaagacagtgtggtgattcctcgaggatctagaaccacaaataccatttgatccagcaatccccaaaggattataaatctataaagacacatgcacacgtatgtttattgcagcactatttacaatagtaaagacttggaaccaacccaaatgtccataattgatagactagataaagaaaatgtggcacatatataccatggaatactacacagccataaaaaatgagttcatgtcctttgcagagacgtgggtgaagctggaaaccatcatcctcagcaaactaacacagaaacagaaaaccaaatgccacatgttctcactcataactaggaattgaacaatgagaacacatggacaaaggggaacatcacacaacagggcattatcggggggtggggagtgaggggagtgagagccttaggacaaatacctaatgcatgtggggcttaaatcctagatgatgggttgataggtgcagcaaaccaccatgacacacgtatacttgtgtaacaaacttgcacattctgcacatgcatcccagaacttaaaaaaaaaaaaaaaaatctgagtctaattcttcttcagcctgactacccctgcttttctcaagaaatatgtcatatagcacacttccaatcaacactcaaaaactcttatttccttgggaataaagaagcagatttcaaattatagattattgtgcacagtgtctacttctaaaactgagttactgtatttgaagactggtgaaagtttcaacgaacacaacaataaccatagatagatacttatacatggtgaagactgtaccattacatggattatttcactgttcctcatggcaatattaatgaaatggatactattttgtaaccttagtgagccatggagctgtacctcaaacccagtcacactgcctttagaagacctgtccttaacaatatattatttttgtgctagatattctgatcgtaatgatcatatgaccaaaacagttggcccattttgaatcaatctacatttagatcattgtaagtaattagatgaatcacttgcttattggcaggtaagctattgtgatttcttaagcatatatttgaagttaaactgttctttggaacatatggataattattttttttattacattttaagttttagggtacatgtgcacaacgtgcaggttagttacatatgtatacatgtgccatgttggtgtgctgcacccagtaactcatcatttaacattaggtnnnnnnnnnnnnnnnnnnnnacattaggtatatctcctaatgttatccctcccccctccccccaccccacaacaggccccggtgtgtgatgttccccttcctgtgtccatgtgttctcattgttcaattcccacctatgagtgagaacatgcagtgtttggttttttgtccttgcgatagtttgctgagaatgatgggggataattatttatgttcttccaatgtaggtacttaaagtagaatgtttttctactttaaaatgaagtgtattagctttatgaaatttaaagagaagatacaggaaggcacctatgagaaggctcacgtgttcaagtctgaagaaaaaatcattggttttaagtttggaatccctaagttacctttagagagaatggctgaattgctgcgtaaacatctgaagctggcaggaggaaatttggaagaccaaaattaggccatcccagaaacctactttatgatgatatctgtgtgatggagtaatgtagaggaattgacatctccatttaatttaattcccaagggagttcaagaaaatcctttatgtatcttatttaatatgtgttcttcccctacacaattaaaattagaatgcaactaagactctactaagggaaggaaaatacaaatgtaaaatgatcattctttcaattcccttagaagtttgataagtgagagaaggaatgtcaacaattatgctcagattctagactatcactagattttgcctctcgaaaattcttctgcttcctgggaaaataattgctaataagctgtttaacaaagataatcccaatctgactttaattcattcaaaaattatttatagcaagtttaaaatatgaaaagaactgaaacctttctgatctgaccagctggctaaaatcttggaacagagagttttagaatgaacataagctttatgcatttagccgaattaaacatcatttaatttgtatgactctgattaatcatagtcactcttaaatacaaatgcaattttagatttcctctagctcaagtttattgaacactttgtttctgatgtagactaaccttcagttggttgtgtttagttgctagtggctttagatgccccttatgtgagtgacagtaatatttagagggtacatgcatgtgaagggaaaatcttgaaatatttatgttctaccataaggaaatctctttttttcttcagcttagaagaggttatatccttacgtacaaacattatgtttacaatgttttttaaataaaatggtatttttttattgcaactcttcgtctacaatagagatcgatagacttactttaccatatgatgaacaaaacctaaaaaatattacttgtgaacttaaccacaagtttagacaaacaaatgcactgaactgaattttgagtaaacttatgtatagccaaggattaagaaaattccattacagtctatagataaactcttactaccattaatatatttttcaaaagcttgtgcattatgaagttcatgtctctttaaccaaaacatataaaaatatatggtgaatactttgtcaaaacttgtggaattcattaagtataagaatccacataatccaagtttactactatttaattttaatccatagctgaataatgaaagtaaatgaacagagccaaaaacatgtcacttttgagaatacatatgtcctccaaataaagtacatttatttgtattattctttgtctgtccatcttctcaagctccattaaaaaagaaaatatatggaagtgggtgaaagcttgaggactaaatgtgtagctgcaagtacattcttaattcagaacttaaaaatttctaggtagtgtttaaacctattcaaccagaaagggaaacatattccactaaaaccattgataaaaaattatatgatggttacattcaaaggcatgtcctattttgctctcaaacacagcaaaatagcaaaatagaacatgcctttgaacataagcatcatgcatttagctgaaataaacaatgcatttgcaaatttttgccttagcttttgctataactttaaatgatacatgtccttgagaattatggtcaaattttaaataaaaataaaaactgaaaacgtctgttatgttagtttccatttcattattcactagaaataatgaaactaaaatgttacctaacatatttgaaactcatgacataccaaattaaagctaaatatatattaaaattttaattattttgtttatttaattttataatgggagtgagagtactttgtcttttgagactagagaaatatgtaagaggaaatgctacagaatcaaacatttttgcatatgtgtcaagttatagaagaaattagcaaagaatatctaactatatttgttttcaaaagattttttacgtctgccctttaatgtttacagcttatcagcaactagaaaattgagtcaagcatttatggtaagctgtttttactgaagtatgtttgctggttgataaagatgtcctctgtgagaagatagaagtagctagttatcttcagccagaggaatattttgtattaacatgcggcagagtactttgaaaagtggtttattgaagttcttactcactttagttttataaaaggcaatgtgacataaatcatggtatgttttttttttctttttcttttctttttttttttttttgagacggagtctcactgttacccaggctggagtgcagtagcgccatctcggctcactgcaagctccgcctcccgggttcacgccattctcctgcctcagcctcccgcgtagctgggactacaggcgcccgccaaagttgggtgaagggtttacaaatgttaattttcttatgcttcataacatgcaaatataattttacttatatgtgatatttttgcgtaacaacttccagtaaaaattaaaattaatatgccactagtcattctaaaggaacatataatttaagcaagaaatgtctttcttttcagtctttattaaagtgggttatttttagtggtttctatctctaggtatctaattgtcattttaattaacgatagtttataaacaagtatgtccagttttagaagtttgttaatttcttcaataaccatactaaattctaagtctgtagttactgggtacaggatgcagtcttaaactgggatttatattcatgatattcaagggttattcttaggaacaatggtccataaagttatggggaaatgataaaactaggaattatcactccttctagaaaaatgtatacatgctcatagatgtaattttctaaaataaaatctaatataatagtctcagatctcctaaaattcatccattgctagcagcagtaacatcatttacttttactatgccaaaaatttgtagtattttctttttatacatactactgcaggttccgtaaagttgtttctaatgtagatttcgcctgagtttccccatgtcaatttctgcatggtggcaatgtttcagttttcattgcctgttcttaattcctaagtttagaacatttgggttgcaacagcatttatcaatgcaccaacacaatctgcattccactgacatgtacataatcttgtcttgatctttgatgttaaatgtgagttttacacgttaatacaattgcttgagaaattccttgatgggtgcagcaaaccaccatggcacgtgtatacctatgtaacaaacatgcacattctgcacatgtaccccataacttaaaagtttaataataataagaagttacaaaagattggaagctagcatcatattatttctacttaggcaacatgacaccaactcctgtatataaaacaaatttgtagaaataaatactgacattatagagtggtgtatgctacagcgtcaagctgtcagctgcgttggttttacctaaattctgaatataagaatttacccagttgctcccaaactggctttaaggaagatacattcttcactaacctcgttgcctacgtctcctcttttattgtgcaaaagtgtttacatattccattctctttatcagaaatacttatgccctactaactatacttttgatcggattgcttcaatttatttttgatacttcaatttaaatatctctttctcagggatgatttttctgtacatgtcctttctctatcaaagcatgcaattcattttgttttctgaaattaaaaagaccagggtttattatgttgcatagaatatggtatgtgctcaaggagcatttcatgttgaaaattaaatgtacaaatgaatagatgaaagaacaaatgaatgctataacatagtgcatactgaagatacacctgtttgatgaataaaacatgctctttgccttcagttttagagatgctcatgacaaaaactgaaataattgcatttggactttcctacatatactatctttatatataatcttgttttataccaaaatcatgattgtctatttttcatacaatgttttttcaatgtcttttcttcatgtagtctcctacattccttaagagcattaaaacactagatttcagaaccaaggagagttccaagttgatgtcaaccaacaaaaaacttggtgcctgaattttgtaggagaaaactagtaatgtactttaatcagtggttaaaattggccgctgactggggccaatgctgtctagcacaattattttaacaattatcatttttacaaacaagatagctgagagctttcacgtaattcaatagctgactttaaaaattcaggatcatttttcccaactcaatgttacttcaacatcacttgaacctatggctctgataattgatatcaaggctgaatttctcttttttgcctatatggttcatagacatttaaaaagtcaacaccttttatttttacagaagacattggaactacccctgttacttgtgaaaagttttcagataggaaatgagactttcaaaatgaagaacaacttaagccattgtcatgagctacttttcctagggttggtaccttaagaaaactcactggtactcatatccccaatccaggcaaactttttattcccaggatttacatactcttaatagttcatcccaccagccttatcctggattctgccacctcacttatccttaagccttcccacttccttttcataaaatattaaatctataaatgaaaattccaggatatatatcacattatcttttgctgtgatatattccagtttatctgattttttagaccgggaattggcaaattaaggaccatggatcaaattcagctgaccatgcatcattttttaaaataaagttttattgaattacagctagggtcatttgtttacttattatgtatggttgcttttgtgctgcaataccaaagcagacagcatgtaacctacaaagcctaacatgtttattgtctgaccctttacaaaaaggaccttcattgactcctggatgtagatattaggaattataaacatggttttaaggaacatattagagaaaatgacatttcctggagtcacaaactaaagtgattgtagccacatgcaggtaaactaaaagtgatcagacttggtataagaaatgggaaatgatggacactgtgggaactttgaaggagcatgcttagtttcaaaactacatctacaacccagccccaggtcaatttcccttactagattgtagaccatgtattgctaacccttctaccttttaaagaaaagccagatatttatattctaatgtgacactttcaaataaaaaaaacccaaatgttttagggcaatttatgcccaaaacatacttttggcttgatttggccatagatcatcttgttataatcccagcttttattaaaaatagttcttttcatgaaaatttaaaattgcaacatattgcagagccaaggagagatcaacaaattatactttcttagatttctctgaaaatatttataatagaattcctaacacctatattaacatgttcataaaaatgtcactgttcaagtctctgagtgtttcgctcaaaattgaacctgcaccaaaagttattcagaaccagcaataatccaaacgaaaaaggtctcatactgtatttcctaacaatgtggcatgtttcacactcattagttcctagccctagtgtacatgtaaaagtcatccaattagccttggatgaacaatatctattgaggcaatgagtaaactgtaactaatactataattgcatcttctcatatgtttgttttaaaatacctctcaggtcaacatatttcccatttagaagggtgtgagatctgtagggtatggtggataagtcagagtccctgtcccccttagctagggaattagatagaatttaataaagtggcttgtttttaaatgagggggaaaaatttagggaacaagagagagtgcagagcctgcggattaatgatagttccaatagctcattaccacctctagaccaatagaagaaaagcaggttccaagttatgaaacctggagtgagaagctaatggctacctgacaagaccttttactagactgatgcaaccaaccagctgtggcttagaagccagggagcagagaggaaaatatcctgaccatcctctcaccttctactgatttctcccagtgttgaacccactgacggcctgagggaaagggcacttgctgagacagtccacaaaggtcggcttcctcacacacacggcagggtatggcgaagacagaggttggctctgaaggggcgaagagagaatacctggccccgtgttcattctttcttgtggcttgtaggtcagtgttctaacctctgaaatatgtgtggttttctgaagctgaaaacacagtaatggagagcatgaattggaagatttttctttaaagctattgaagtgaatgagctgtgagtgaatacttgagcagagagtatcacatgtgtctgttaatgactattattatatcgtgttctattatgagtctggcaagctgagaagtcaagtgagggtgacaggcacagtggaaactgtgaaataccatacctcttctagcatcctctgagaggaagtactgaacagagaattgctattctatataaacttacgtgtgtgtgtgtgtgtgcatgtgtatgtgtgcctagaaggaagaattctcatgaagaaaaggataaattgtacacttatatattggagtattccccagcactgaactcaactacttaattttgaagttcaattgattgctttaatcagaccatgctcttgcagatgtactgtaacagagagaaagaaagcacgtcactgttaattctagctgtaggctggcctaataagaaaaataacttggatgacttgatggattttgcacaattctggaaaaccttaattagtattttgggaaaagcaagcagttggttaatggctgcatttggttttatttggactttattcaaaagttctggtttcacctacaaataactacatcaaatgttgctttttgggttaaaatttgcaaaattgagtttgatagtttagttgcaattaaaatgttgggaaagctatattttgtcagctgtttccaggttatattaatattctgtttcttcatgtttacataatttatgtcagcatattaattgatctaaatatttttagtgcaaaatctatattataatgtatatgtttgaaaatatcttttcaggaaaataaatgcaattaaatattcaggatttagcatgaatataaatttgtaataacctattttaaaaagggttaacctcaaattagatattcttattttaagatgggttgagaacatatgctttagggtcataatatctgggcttgatcccacatctgccatgtattatctctgtggagttgggccggttgtgttacctttctgtgtcacttttcataccagtaaaatgaggataataatactatcttatgagatagttggaagcactaagggttaattgcaaagtagttaaaacaatggcaggaacatagcacttaataagtcttaattattatgctttcactaaaaaagatacatacatatatatgttcagtattttttatatatatatgtgcgtgtgtgtgtgtgtgtgtgtgtgtgtatcactaacggaacaccatgggaaaactaggaactctaaatttatttaaaaattattaccatattgaaatgggtgaagagatcataatgtgtcactagtatgcagattatttttctccttttgccctgttggtagaactactaaccctatgatgcagagaattgtcaaaagcatcaatacactggatacttcttgataagcctttcttttctgggtgacttagtttctgaaatttaaatgtgatgactgtaaaaaaatcctgaaaatgaaaaaaaatcaaacaataataagttttgtattattggatttttccagtacatgagagctcatcattcaggtctcttcctaagtctatgtcaatgatatccccttgaaagtttgaagtaggcaacgaagggagtattaataccacacaaataggttaacgctataaatctcgactttttggaaggctggttgttaaaaacttatcaacatgctgctatgtaatccctacatttgaagagtccaattgaattattctgtgctttgatgcactttttctagttttgtaataataaatgtaccatagtaattagtactacttaacagtatagaagtatttaccagtctataataaagctgtttatataaccacaaaaattgtttaagaaataatttcaagattcttctaagaatatacagttttgtgacaaggttgacctttagtagtcgactgtttctaaagaaatgttttcttataagaccctaaaacttagagtataataaaaaaaaaacataaaaaaaataaaaataaaaataaaaaggacaaacacatatataactcagaacaaaaaaaaaaaaaaaaagattcttctcatgcagcccagattttggtaatacgtcttcaatgttaaaaatctggaccctgtgatgaaataatttgtgtaccaaaccccagcaccacgcaatttacccattttacaaacctgcacatggaccccctgaacctaaaataaaagctggaggaaaaacaaaatctggaccctgtcgccaggcaaaactatatttgagagatgcttcttcatttactagctaagtgattttcagcaacttgtttgtcctttatgatactgtgatctttaaaatggttgtttataataataatatagagtttttagaggctttaaagaaatgtctgtgaaattgaacgcagtgcctcacttcaaaagcctcacttatgtgtggattgatttgacagctgctgtatgatctgctttccaggattgtacatagaaagcatgctatcctgcctgcagatgccccaaattccacttgatcgtctagttagtggaattattttatttctattatctggaaaatttagtctaaaatgtgtatctatatgttatggttcagttatggttcagatgaataaatttcaagggatgttttgcctattagatgggtagaatcaacaactctataacttgagtgtggagaagatagacagtgggtaaaaatgtgtttagaatggagaaaattgacttgaagaaaatatactaagagcaaaatgtatcctatttgcctttagctcaggacgtttaacttttaacaagaaacacgctaaattttctcttaaaatagtttactctgaagtgttagatgaaagatatgatataaaacacatataaaagacaagaatcaacatagggacaaaacttttgggaatagggacaaatggacctgatgttcttttgagtataatcttaggcaggccaattcttcactaaggacttttgtttgcctcccttgcaatctctaaaatttcacaggatcctcctctgagcttgatttgtgaggttactgtaaatatgttacatttgcatagctctgaacagtattcaaatgctttttacactcattagctgagggaaacttcccatgagccaaagagcccatcaaagtaatgagggaagaacagaggtttcatccactgaatcacagcgaatgggaaacagaaatgtaattccacaaaggagacccaatagttcctagtaaggaagccaaggactattctctgatgactgctttcttgtggggttctagtcctttgatctacttttaagtaatagcaacattctaattaccaattcaatttaaaattcctaagccttgtaaaataggtaagtattagcaaatgttaaatttttatgagcaatgggaaaagggattgtagttgttgtttcttaatagatataaattatgtcttttatagttaatagcactaacaatttgctgtagcttagcatgttaaaaataaaacactctacctgtgtatacctctttgacctaccatcttcatagaaacaagataaacattatcattgtaaattttcccctatcaaaatgcatttttatttacataagtaatacaggaacacatgcaaattgtattaaaagttaaaatataatggagaaggctgattcttgaaaatgcttgaatttcacaaaaagatgaaaagctttaatctatgacccatgagcttgcccttaaatctggttaaaaattttggaaagttataagcaatcaaatgatgtatgaggatttactgacgagtcactggaagtagatgagaattcgtgaaaaatagctatttaaaaccagtatcctgccatttttaaaatgatatcactaagctggaagatcgaaaagatttggtaggaataaaaaaataaatttgtgctatccttaaggaaaatattaaggactgtaggttaacggggtagatttctagtgatgtaggagtatacctaaaatggaagagagatgaatgggtatcagttaacaggattgtttgccttagggtttgtaccttggcccttccctgttcaacatatttgttaaaggctgatgtaatctgacttgaggcgcagcccactagtaaacataagattcaactgtgatatggaagtctagctcccaacagtagtttaatgccaatccttattatagcatcactattccagaataagactctaatatctgactctgatgcctgattttatgatgttttacccaaaagttatatttatcatgctttgcctagcatgttggatggaaatgaaaaccatactacttgagggacatttaaagtaactgaagatgtttagactggagaatataagattaaatgggcagagaatggcagatttaatgggcaaaaactatgatacacacacacacacacacacacacacacacacacacataaaacttccatatctgagggtattaaactataaaataggtcttggtggaataaattaaaatgtggtgtaaaataaatataatttattttttatttaatctaagaaaaaatctttatactgtttatagattttcataattagaataattccctgtgaaggaatagctttttcaacacagaaaatgttccaattcagcttggaggatgacttttcagggtgattggtcatgggactcatgtgagttaataaaataatatccaagaacatttaaaaactgaagtcctcccctactccataagtctatggagaatttttattagtgtaatttttttggaagatattgatatttaattatctttattttaatgtgtacttattaaacttaatttagaaaattgggtgaaaaaagaaaatttaatgctctgtcacattggtacaatgttgtttctttcttttctaatatgtaatgatctctctttatttgtcttttatgtcttatctatgtttcctccaagtctttttagccatcacttaaaagttatgttatagagcattgtcaacttttcaactttttactaggaagcagtgattttttgattcaacattctaatggctggctttccttcattgaattttctgctttccctttagaaaatgtagtctgaattaataactcacacctaggaaatcctcattacttgctaccacaacctgtctttaaattttattattttattttatagacagggtatctctctgtcacctaggttgaagtgcagtggtgcaatcatagctcactgcatccttgaacttctgggctcaagcgagcctccttcctttgcctcccaagtagctggaactgcaggtgcgtgctgccatacctgactaaaatttttacttttatttttttttatagaaacagtcttactatgttgtccaggctggtcttgaactcctggcctcaagagatcctcctaccttgacctctcaaaatgctgggattacaagcatagccactatgcctggcctgaccccctctttctttaaaagcaaaatttgaagaagtctatgaagatctagaagggtatttccaatttctgtctaatgacatcccatctttgaaagaatttgtctcatctttctcagtcatcacagattatccaaaaaattatttgtaattattgaatcccttttattattcacttaaaaaatacaacataaatgctaatttcctgggcattcttaagctgacagagtgctgtatttctttctcatgtctcttattcctcaccataacagcctggaaaagcataccctccttaggacaattgggttctcgacttctactacactgtagtagaatagcaatgctgctactttccttggaggagtagagatatctggttcctgttttatagggacactggagtaaaatccactgtttatgatgaatgtggaaagggttgatacagctcagcaatgaataagcctcagagaatccatccttatgagagatattgtagaggcaaatctagtcaagtaacgttaatattagcatcaacaaacattaatatagttcatcacagtttataaagtttataaagagctctaaatgtcattcggagagccagtttgaaattgtgtataactatgaataattttcaggcagggaagctgatgttcaggaaatgtcagtgctctgacaaaagtagagcttcaggtcctctgtaggagaaaacccaggtaaatcaatgctttgtaaaacatttcggtatgtccatacttggacacatctgagatgtcactcatagcagcagtcatttccattttctttttttctctcttctttttctgtcaacttttcttctcactcctcctttcctttcttttactttccctcacttccagcctccaacttcttttacagctttactctcctactgatgttagcaataacttgcgtatagttttgacgcacgtcaagagcagttattttttttttctgttctaatctctgagaatctggccaaggggagacagtggcattataaagggaggaagtactggattcatatgagcgagtaaggtggtcttagagcaaagaagtgaaggcaggttagcatgaataaagataaccatggagacctgaacagtgatatatttaagaatactgacaaagaaatattagggaacatttagcagtaatcgcataatgacaggcatatggacatttttattaaagcccaggtagccagtctaaaatacactgtgtccaagttaatagcattgcagaaaacacactctcatgttgcctacatgggcacgttcaactcagacaaataatgctatcaatggtaattggaagtgctattatccatatctgaatgtgcctcaggtaccattagcagcagcactcttttcgttttgttttgatttttgctttctcaactgtagaattcacattatttttattaaaatttgtcttgcattaaaaattgtatttaataatcacgtctttctctcagtcaattaatgaagcccctgtccccccagctaaacagacttgcctcttttcaccacttaatttctaaagtgaagaaaaattatataaatagctaactgcacaaaattacatacgcataatattcaaagtattttaccagaaattatatagttataccattatcagccatattaggtagttgttaaaatccttaaatcattattctaattcaggctagtttaattcttttataacttcttaacctaatagttcttttattaattatttgcaaaattgactgtttaaacatttctcattgcagtttaatatgaaaactctgaacaaggacaatagtctcaatgttaaacagtagcctctacaatacttccactggactttttatgacatgcaaatatgccaaatgtcccacccaaccagtgttactgcagctatgattgcaacgtatgaccatgaaggaaacaattagtataccacaaataaattcagaaatgtctctcattatattcagcttatattcagctatgtggctgagaattcttggaatgaagaaaattaccttcttagaaagtttcccagttttttctttttccatttgagctatagttttaagagggagaaatgcatatgagccatattttgtctttacaactaattcacaaagaggtgaactaaaaattaccaaaatgtggattcatatgagccatattttgtctttataattaattcacaaagaagtaaactaaaaattacccaaatgtggattcatatgagccatattttgtctttacaattaattcacaaagaagtgaactaaaaattacccaaatgtggatttttagccagttataactcattagaaaatattagtagttggttgaacaaggaaacacagatatatgggggattaataattttgctatgtgggttaagaatagcctaaaataaatttctattgcttcattagaacagtgtcacctgttcatgagatcctgaaatgtgcctgaatgtaatgcaatggcatacaataaatgtttattatttgcctatcatatgtaagttattctgctgggacttttccaaggtacatttagggtagaaataatcactgggcagagtcaattataccttctccatgatcccacagcaaactggaaatgcctggtttgtagcctttaccatacttcatggaaattatctacttctatattccagttgctgtcactaggttttgaataacttgaaggcagattctatgtgtctttttttttatctttgtatagctacacaaactcagaggtgcatcatatatcatattgttttatttgattttgatttaagtaaccacaaaaccctatcctatcattttgaggggctattcagcctatgcccctcctccacttactcaacagtcccatgtggcttggtaaggctgtgtgtggagagagcctatttgtcttagatcagtcctcatcatcattcgtcatcatctaagcttgcctggtctcttaaagatagttgactcgattgtttttgtgctgagtttgagtactgaggtatttgttgaagttgggagccctgggctctagaatctagcctacctagatattttatgcagccattcacttctcagattctaccgtcttctcagagcagaagagggactctttctggtttagataaatgttaagtctttcccctagtttaaccttttaagaacttccttttcttcctcaaccctcctggaatgtctagcacaatgcactttgttttaggttataaaacaaaagacaagaatggagatggtctccaggaaacttaggctttcagccaattattatccccccattccaccccagtaaagtaggaccactaacttctggctaccttgctagaataagagagataaaagtataggagatatatgcacacattgacatctcagtacattttctaaccataattatatatctagtgcagggaaggttctgccacataatatatactcaataaagtgtgtggaatgactgaataaatgaatgggactcttcaacataaagaacagggtctattccattttcatttctattttagtattctatctagtattcaggattagcattgtacatgacaggaagcactcttctttaagctggaaatatgttcactactaatttatgaaaacttagctgttcttggacctattgctataggtctctgtgctatcttgagtaataaccagaggctatgctgtaacaaggcccccaacttagtatgtgcctttgctttctagttgaggattagtggataccacattctaactcaaaggaaagaggtttctgattgaaattttgggcatcatcctggtgggagaaatattttagaacggagcacagtgttagttgcattccctcacttcactggggcctaggcctactaacagtaactctgttgaaatgcattcttaggagaaacagtgaaatgaaatacatatacctgcacactaggaggcaggtgacctggaattttatctatcaccttcttgagcagtgttgtccacatccacaaatggggccacattacctatatattagactatgaatctctcttgaaatatttttctggctgggtggggtggctcacgcctataatcccagcgctttgagaggctgaggcagatggatcacgtgaggtcaagagttcgagaccagcctggccgacatggtgaaaccctatttctactaaaaatacaaaaattagccaggttttgtggtgggcatctgtaatcccagctacttgggaggctgaggccggagaattgcatgaacctgggaggcagaggttgcagtgagctgagattgtgccactgcactccagcctaggcaacagagcaaaactctctctcaataaaataaaataaaatattcttttctgtcttgtgatcccttagaatcttgataaaattatttcatagactagatatattgcagtcttgttgcattgtaaattagagttcctcatcttttctgattaaaatcaactttttttcactctaaaatattatgtgggaagttggaagttgctaaaagtacagatctttagagtactggagatgagggtccaattcttttctgttgtaagagtgataactgatttggatcagacagaaatgactttgctgtatatctgcaggacttagttatttggcttattccaattttgaatacaaaataaaatttgagtgaaaaaaaggaaagggagattaatagaactaaaaaaattttcaaggaaatataagacaaaaataaatataatattagggttcatcaaaattatatacactgggacaccaatctaaaattatgtttaaataatttcttcagttggctaaagtatttcaatgatactttcttgggaaggactcctaaggttttgtaacatactctttgtagcatatgtttttaattatattgaaaattaaaaatcattttatagatgtgggagtgtgtatgtgtgtgtgtgtgcattgtatgtatgcaagtttaactaattttaattttctgttaatgcatttttcaaaaaggggcattttgatgttcttggttgaactggtccagcaatataagaatgtgatattttagcaaatatgcaagctgactagcagatggtgtgattttgtgaaatatgtatattgtactcaggaggtcagccacagattttcctgttgtttgggtacagaagacaatgtcatcatctagaaataatacagaacatactttcatctttttgaatcagtttattttttcctgccatgaagatttagaatctcctcaaataaaaaaatacaaaacttgtctagaagaacgtgagaaagagaattgattctaattttctctatataaagtcttatttgggaggaaaaagaagaaaatatattaaaagcccttttacctgaaagaaagataattttctggaaaataggtagaccaagtgtatgtatttctcatttgatttctttgttgtcagctctttgcatggaatacagaagcttattgagttaacctttttcttgtgatatatgaggttgcttgtgttttgacaaacatattttgcatgcatagcatgaattttgaataaaagtctaattttaggtgcattgtctttcatgtaaaaattcttttaggatttaggcatctttggtcctatgcattgtatctgtggattcactacctatcgtcatagttcctgaaataagaaaatctcaagtttccacacttaataattttgcatttatatggaaaaaatgaataagaaaaatgcccacgtggtaaccccttggagatgaagagctagtatactctgagctactgtgagagctttagggtacagagtgcatgaggacatagggattcttttctgagcagagtttggagccctgtagctgactgctggggaaattagtttctaataaaaagaaaaacctgcagttcaagtcagactaacacttgaggtggaaatggtgactctcccagaaaactccctttggctctaaatctgagttttctcagcaacccacataaaatctttaaaagcgtaatggcatacctagttgttcacataaagactcttaatgagttgagaattctctgctttagtatgctttacattcaggttaaatagagttagtctccatgaaagttagcgctggttctgtgacaagtgactgaagactcctaaacagggtaaagtcaaaagggaatacaatgacttatagaaataagaatgttgtgggtgaggcagacttcagttggagtgtaatgaaggaactcaactggcaaaaccccaagcatgccatggttagctcttatttttactcagtctgcaactagactcctgaagccaaacatgggtggaagacaacccaagaccttgctggctggtctccctaaattatgttgattcccagcttcaagtgagacttaacggtgtttggtgatctaacaccacttgatttcccaagcactgtgagatgggtgactctttcgcaatgtttcctttctcctcattccttcactgcgtcttgcatatgttgctctcaattgatgactttgctttccatttcactgagaaaatagaagtcatcagaagagagtgtccatgtattctaaatatatccaatctatgtttgcgtcctgcatgctgtctcagcctctctatcaatgcacactggttcccattcctccttgagacgctaacagcattgttgcagcatctgtcttctgtctctcctgcatcatctatttttccctctgtgctagatcattctcaaccacatacaaatatgccataatactctcctatcttaaaagaatgcactttttgaactccctttccttttagatatcaccttattcttttagttgcttttactataaaacttctctataatgtagtcttatacagtctgtcttcactttcttttctaacaatccaacaaaactttgcttattaaggtctccaatgacctgtatggttatttctcaggccctaacttacttattagcgatatttggcatggttgtcataccctccttcatgaaacccaatcttcatttttcttttgggacacctcactggccactcctttcagtctcatttgctagtttcatctcatcctcctgatgccaaatgttggatttttcccacctcttagttctcacttctcttctctctttttgagagagaagatgatattcttcagtctcttagctttaaatactgtctctgtgttgatagctttcaaattgtttatttatatcccaaaattctgccccgagctttagagtcatatacactctgcttagatatctaatagatatctcatgtataacatgatatctattcatacattcatgtatgttccatacacatttgcctagttgtttccaaatttctcatttctcttcacagcctccttatgtcatcatacctctccagaaacatttcccatcttagtattacatcaaatgcattatttctttgttcaggcccaaagaaaataatacaaagtcactttcaacatctttctttctcctccctcacaatttacctctagtccatctacaaatcccattgactctaatttcaaaatataatcaaaatacagaaccttcactactaccatgccatgctggctcaaactaccattatgtctcccctagtctgtggcagtagcctctcagctgatctccttatttttatccctgttcttctacattctgtccttgacacaagcaaccagagtgatcctgatcaatctgtcatattaagtcacttatctgctccaacttttttttttttatggttttctctatcagaatagaggccaaagctctggaaatagtccataaggcctgaaagatctggcattggtgtgctcatctgctcttctctctcttgctcttgctgcaccagccatgctggccaacttttctgttgcttggacatttcaaacacattcctgacttgagatttgctgttctccctgcctcagatgttcttactctctaaatagcccattcacactaccctagctagtccttcccactttcctacacaattcttcacatcctctcttctcctttatgtactttttgcatcacttgttatcacttactgttttaaaaatttattgatatataatagttgtacatattttgaggatacatgtgatattttgatacatgcatgtaatatgtaatgatcaagtcagggtaattgggatatccatcacctcaaacatttatctgtgtgtgtgtgtgtgtgtgtgtgaattttgggaacattacagatcttctgtttaagatactttgaaatatacaataaagtagcctatggccataccacccgaaatgcccatgatctcatcttactattttctatctcactaaagtacaatatgtgctccctgagaatgggaatttcttttattttctgttgaatcctcagtgcctaaaacagtgctgaaagcaaagttttaaggtcaagattttagatatggtctaaagattctggatttcactatctgcagtattacctggtcaaactgatataattagactttccagtgctaagtggaaaatgaaatcaagtgtattttataaaattttaatataattgttatttgagaagaatataaaggttaatgtgaaaacttaataatatttgtctctcaaatattatgagcatattgctcaaagccgcttgcttaaagaggaacattatagcagcgtagggaaaacttggaagcagcctaaatgaacgcagcaggggctggctccattctttggtatgatcatgtaacggggtagttggcagcctttatagactgcactatcatttttattggcttcatattaatctataattagtttaaataaaccagtcattgtagtgtatatttgatccagtttttctcctttagaaacagtaatggacatccttatacacacttccatacatatttgcatacttgttgtcatattatccttagagcatttagtatttcactattacaaataatacttcagtgaatatccatgctcattcatcattgtcaccaactctacttatttttatagactgtattcctcgatgttggacacttggtaagagggaatacacatttcgagggctctttatacatcttacagaattgctttagagagtatcaatttatctttctttcagatttatattatagtgcctgattcatttcaagcttaaaaacacttggtattaggtttacaaaaaatttaagaagatattaaagattctaaaaatcttttcccaagtagattaggatgtgtacctacacaatttatggtatagtcagttctactataatgcttgttttgaaaacttggacttcttccaagattgatctattagggcacaatttgagtatcttgcaaaatttgcactttcttatatgtgattttatctgcaagcaacactaggtgaatagagaaaactgcacccagctgaaccaacaagtgaaggaatacaaaattcaaatacctaccagttacattaattcacctcttgtttatgagccacacctatgtatatctgattttgcaactttctatctgatttcagataacgttccttctgctacttcactgtaacattgtgatgttttggaacatgtgtgtctcaatacagtaaaactgacttcatgtgatttcaacatatatcataggttacgtctacactgggtattatttctgtgcatttgttaacagcttagataggtagcataggtagctgaatgctattcaatatgcacccctaatcctatctgctttttaattgtgcgtggagaaggcaaatgagaaagcagaaattgaaatggaaaaggaagtgttcagagtagttggtgtaagcaatattggaacacatctgtttgcaaaatatgctttagaggcttggagatgtgttctttcaggcattgctttccatcctgggtacaattgaatccttcagccccttagaaagataaagattagtctgaagctgatatacattttcaaggtagcagggacatgagtatttttcaagcaggtagtagagcaggatccatatcaatccttaaaactctgcaaacatagaattattttcatcagtttcaggcaagagagctgacttctctttacacagagtaaaccattacggggacatcaggaaagaccctttcctcaaagaggcattgtcaactcagtcaatgatgcctaaagagttccatcccacagctagagattaaactgcaagtgaagccatcctggatttcgtttctttgtgttctaatttagattcaggtgcaaatggtgtcaagtccacctaggaaaatttggaggataaatgaactggcaatgtgtagttgaagaagatagcttaaagggaaacaactggaagtaaacatagtcacagaaaatgacatatattgcctacttaacaggaagacagtggtctgacctcttaataaggcacaatgtccacaagtgagggtagacattgaaagaaacagaacctgagatgattttattgttcatggtcatttgtacagcctcgctctgttatccatttgcatctttgcctcttggtcccgcaagagcctctctcataaactttgagtagaagatcataaaaaattgttacttaaaaaaattgaagtcctaaaatttaccagctctgaaggaatataccatactgatatagaaagttcaatgaataggtagcaacagaaataagctttgataaacaaagaaaaccaaatgatgctatctgaaagcccggtctttgaaatcaggtggacttggcctcattctcacattccatttatgggttcacaacgtggaggatgtcactcagctgtcacgagactcacttcttctgtaaaagcacaactgatgaaaacacttgaaaggatttttttttaaatattgaatgagataaaatactgtgaaaatgttctataatgtttgacattggaaagggtaggaaatgaaggttaacagaagagtaaaaataagcaaatgaaaaaacgtaagaacattatgtcaaagctctacctttggaaatagatctcaccctagagatggacagatgatacagtctcaaatgcaaaaccaacaggtacatttgagattattaccaatatttagcgctgttatcttttgatttattcatgtattcatttagccctcaacaaatactgagtaactatttataagacattaagctaggttccagagataaagcaagagaccagtccctaaacttacttgtacagtaaattagaacagggaattctgtttgatatttgataccttagaattctgactattactggcaataataatacatatgtaataattactattgtgttagattgggctgctgtaataaaatatcataaacggagtggcttaaacaacagacgtttatttcccagagacagcactattcttatcatcgcctaccctcaggacctaatctaaacctacttacctcacaaaaggcatacctccaaataccattactttggaagttagggcttcaacacgcaaagtttaggagtacatattcagcccctaacacctatacactatcattaaggtagaagctccgcagaactttctctctcttatcctcaaaatcatctcctttagatagctattagtatcctcactttacagatgaaagctgagacccagaataggtgaattcattgcccccaaattccatgaccactaagtgtttataaatcagaatgaattaattggccaaaaattccatagccactaagtggcaggagcagatattgagacacaggcttgtctgtgattactcagcctgggctcttttaacactgtgccttttaataccattagagtagtattcacagaatatcattcagataggatgacagaggatggtcaattggtgaagccaggactattccttggattagtagaaatgcattaaaaaaaaaaaactcaaacatgtaagggaaggacacttgacattagaaaagatgaaatttctggagacacaattgtgtgtcacctaatcagctgtcacatcagggaaaaaatatcttggagaaatgttgaggtcgccaaacccagggagctttttaactgattcatttcatcttgcatgcatcccaatagttttagaagctgctggatagatttattacacaaagtctgtgtctctagctttcagcaatgtgggatttctttttctcagagcccactgatcaaaccctgcattcacacgtttactgatgtgtcatattttaacatccaggtctctgcacaatgccaagattatgcagttctatggagttaacttagaaattttgtcctcacacagtattctatagttgttaattttccatgcaaatgaaaacatttatataatttctgctgtttttatgtggtctcataaaatgtgaattacaaaactccatctttgaatttcctgtgctgctccactttcattctctgtaaggaatatttgccagaggaaggtctatgttgtactttcgtagccaactagaatgttaaaaggattggagaggagatttactgcatatttgtgattattgttttttgggagtgagctgaggtcccaaaccacctattccaagcccacgctgtggcagaggttggaaagaggcttcttgactctacttgtcctctagccaagagggaggctctccctagcatgacccttaggcctcacctccacatctctctgtctctggcataggttattggtcattatgtcacctctttcttggtaggaccccagagaatttcacatcctaatcacaagggatataaaaactgtcaagttctatggatccttttcacttttccttcatgttttaatgtacttgttcctcttctgtaatagcaatgatcacaccatataggtattaaaaatatgttccttctttttcctactggaatgtccattccttgagggcatatctattgtctgtgcagctgcagtgcccaacacaatgcctaacatgtgggtgctcagtgggtgtttgctaaattaatttaaactgtattgcccttagtaatggcagtcggagtagaaacagcaaaataaataggtattacagaggctgaatgtcaaagcttgacactgattaaatgcagggtgtgaaaaaaagaaaaagtcaagtgtgaaaaatatagataacaaactgagtgacatggatagaatgcagaaattcttctgataaaataaaaatagtagctaaaatttattgaacagttactatgtgctaggcactgtgctatgtgctttgcatgtattctctctttaaatcccaacccaataacctgttttactaatgagagactaatcaaaatgccaagtaattgataatgccaggatttggagtaagccctatttctctgtattctgtaaaaccagaatttctcaaagtgtgatttaggagctacataaaccgaaaagcatatggaagtggtggttaaaatgtgtattcctgagtttcatctcaaacctgtcactgaatcagaagctctgggtgtgaatccaaggattctgcatgtttaaaacacgccaagcaagtctgttgtcagctaaatctttagaagtagtggatttaattagatttagtaaacttttatgaagcttctataagattgcagaatttggcccaggcgtgggagttataggaatacacataattcctttccccaagaactattgaattaataggaaaaaacaaaccatcatagcacactgtaataagtacttgagtagctttgggatctggcaaactaatcaaggaacgagtaactctggacatgagcaaatttgaagtgagaaaggagacagagtctgaaaaacccaccagggagctgcaaatgtggaaccactgagacaggtcaggattgaatataatggtcatccatgtagagataaaagttgaagggtgcaggcagtaagaatgccaaggataagatttgaaaataagaggatcaatagattgcaaaaaatttcttccattgtgtaggttgcctgttcactctgattatagcttcttttgctgtgcagaagctctttagtttaattagatcccatgtattaatcttggattttgttgcaattgcttttggtgttttagtcataaagtctttgcccgtgcctatgtcctgaatggtattgcctaggttttcttttagggtttttattgttttaggtcttacgtttaagtctttaatccgacttgaattaatttttgtataagatgtaaggaaggggtccagtttcagttttctgcatatggctagccagttttcccaaaaccacttattaaataggggatcatttccccattgcttgtttttgtcagatttgtcaaagatcagatggttgtagatgtggtgttatttctgaagcctctgttttaaagttccatctgtttatatatctgttttggtaccagtaccatgctgttttggttactgtagccttgtagtatagtttgaagtcaggtagcatgatgcctccagctttgttcttttttcttaggattgtcttggctatccaggttttttttggttccataagaaattaaaagtagtttttttctaattctttgaagaaagccaatggtagcttgatgggaatagtattaaatctgtaattactttgggcagtatggccatttttatgatattgagtctttctatccatgagcatggactatttttccatttgtttgtatcctgtctgatttccttcagcagtggttggtagttctccttgaagaggtccttcacatcctttgtaagttgtattcctagttgtattttattctctttgtagcatttgtgaatcggagtttgttcatgatttggctgtctactatttgtgtataggaatgcttgtgatttttccacattgattttgtatcctgagactttcccgaagttgcttatcagctttaggggttttggggctgagatgagattttctaaatatataatcatgtcatgtgcaaacagagataatttgactcctctcttcctacttatataccctttatttctttttcttgccagattgtcctgaccagaacttccaatactgtgttgaatgggagtggtgagagagggcctccttgtcttgtgctggttttcaaagagaatgcttccagcttttgcccattcagtatgatattggctgtgggtttgtcataaatagatcttattattttgagatatgttccatcaatacctagtttattgagtgtttttagcatgaaggggtgttgaattttatcaaaggccttttcagcatctattgagataatcatgtggtttttgttattggttctgtttatgtgatggattatgcttattgatttgcatatgttgaaccagccttgcatcccaggtatgaattcaacttgatcatggtggataagctttttgatgtgctgctggattcagtttgccagtattttattgaggattttcacatcgatgttcgtcaggcatattggcctgaaattttctctttttgttgtatctctgccaggttttggtatcaggatgatgctggcctcataaaatgagttagggaggagtccctctttttctattgtttggaatagtttcagagagctaatatccagaatctacaaagaacttaagcaaatttacaagaaaaaaaaaccctctcaaaaagtgggcgaagtatatgaacagacacttttcaaaagaagacatttatgcagccaacaaacacatgaagaaaagcccatcatctctggtcattacagaaatgcaaatcaaaactaaaatgagatactatctcatgccagttagaatggtgatcattaaaaagtcaggaaacaacatatgctggagaagatgtggagaaatagggacacttttacactgttggtgggagtgtaaattagttcaaccattgttgaagacagtgtggggattcttcaaggatctagaattagaaataccatttgacccagcaacccagcaattccattactgggcatatacccaaaggattataaatcattcttctataaagacatatgcacacgtatgtttattgcagcagtattcacaatagcaaagacttggaaccaacccaaatgtccatcaatgttagactggataaaaaaaatgtggcacatatacaccatggaatactatgcctccgtaaaaaagaatgagttcatgccctttacaaggacatggatgaagctggaaaccatcattctcaccaaactaacccaagaacagaaaaccaaacagcgcatgttctcctaagtgggagttgaacaaagagaacacatgaacacagggaggggaatatcacacagtggggcctgctgggggttggggggcaaggggagagataacattaggagaaatacctaatgtagatgacatgttgatgggtgcagcaaaccaccatggcacatgtatacctatgtaacaaaccacattctgcacatatatcccagaacttaaaatataatgaaaaattaaataattataaacaagaggaccaggaagaaatccttggagattacttctcatctgacattttattctccaaagcctagttccctgaataagcaaaccaccataagcaattaaattgcccttttaaacggccaagaacttcagatcactttatgagttttctttgccaaaggagagttttggaagtcatttggttaacatgttacatttcaaagatgactttaagagggaaatgtgacatcactgaatggcaaagttgtgttttagatagtttcttcctaaagtgtatgctttaacaatctcattactctgagttagatacttttgcactatgaaatcctagtaaactattaattctgtggataaataaaaacctagccctgctatcctcacacaccacactcactattctgtgatgccatttaactcttccattaaagtactgttactgtgcctgtgaatgccaagaaaaaagaaggatcaatttaaattgcctaaaaatgctagaatgtatttccctagatctaatgggtaatggcactgacagcttcaaatatgtttcataaagagttcgatattactgttcttgcctactaatatccggattattgaagaattaataaggaggtattacctttgagaacaagaaacatatcttctcctttcaaagggacaataacaagatagtctgctgggaagcatcttcaaaacatgaaagaagagaatttggagtcagtgccattttgccttccatgtttgcttgatgtataaagcaaaggcaagatagtctcttttttggttgggaaaaaagagaaaaatgaatatttccttgttcaggaatcatgaagtgactgcacaggccattgaaatgctttgataacttgcatagtatgtatttttaaatgtagtttggtagaagagaaatgccactgattgaaattcaggaagcttgagttctagtattgctgctgatatatatgaactgtgtgatgccgtagaaataagccatttacccttaactttttagtacataaaatataaggcatggactagatatctaagactctttatagctcccagttgattaatcaaattagcatttactcagggctcattactttaggatataaagtaataaatacttaagtagggttctcttctcaaagtacttacagcctacatttctgccccacctgaaattcaggcttactaagaaagaaaaaataaccagacagaaaacaactccttaagtaactcataacttgacttctaaattaataaatttatttttcttttcacaatgcagaaaatttgtaccagctttaaaaatatgcatgcaatagtagaaagagtattcatatttcaggttacatttttgttaaaggcatgtcaacgagtgcaaaagcattcaagggcataagtatggctatagaatatagatgtttatagctatatatatgtatgcatgattcacaaagtcttgtgttgattaatgtgactgcttatgtttgacatatgaacagatataaaatgtatatacagaaacaaacaaggtaaatatgaatgataagtatgaaaatatgccagggatattttagaagcttctgagaagcacatgttttttaatcagaatcaatggatggattataagctttctaacaagctttcctttaattgatgaataatatggtaagtacaattatgcaaatactttagagaatgagaaggtatagaaaggattctgtaaaactggaagaattacataaaacatttcctcaagcttttctttccaaccctttccaatgagattttaagcataagaggatttcagtctgaaatgcaaggacaaaaatgtaagattacagcaattcttagttagccttacttttggcccttgtagttcatggatatagaggagaggaagaagtgtttccttgaggcttgaagagtattagtcacaggagaagatgtttagggttacaaattattttgtgtctgagttgactgccttatcccaaatgacaaaggtggccatctatagcttaatacacacatgtgcacatacatacaggcacacacacacatacatatgctgcatatgtttatttacaatatgcaaggtcctctaaagtgcaagaccgatggcagggatttaagagtagaaatcttaatagtcaatgaaaatccctagacttcttttgatttgccctgctgttaaacatgcactagatttcgctattttgtaaaagtctaatgtatgcctttgtcatttcccattaatacattccattttaaagttcgatgagagttcttcccgactaaaataaactttttgaaatagaaatgttttattccgaattaccactatgaattacacatgaattttataatcattcctccttggcttttaaatattcagcaaatggtcaaagactgttttcatcgactgggcaggaaaccattcaagtttgtagatggctcatgtggtgagattttatgaatctaacctgtccgtttcacacatacaaatgctttttccatgatttttgaaatcctcacttataaagcagtgaaattactatgaactctcgtgttatcttcaggtagataactaaacactcttttggccaaaatataggaatgaaaagacaaatagagtctcaaagctggaatataatcgatgctggaattagactttcaccaagtaatcctaaaaatacatcatagtaagtgttgatttgaaagaaatactgtcatttctcaataaggtgttgaactaattacccttaaactgcctttgagtcactttctgtgattttcatgagatggtaatgttggtatatattgttttaagcaatgcattaatgcttgccaaatattaagtgaaaaaataaaaagcaaagtgaaaattttatctattctttcaagatcaaccttatgtgaattgttcaagctgaatagcattgaactacccatacatacttccatgttagactcagaattttaaaactggaaaaaaaaaagcctgcagataatttactttttttagcagcagaaaatgttctgatagaactttatattaatgtggaaggtcagtatatagaagagatcaacataacactaatttgctggaaagtgttaaaaagttgggaaaggcaatacaagaaccactccacctacagtaacacttgaaggaattccacataacttgaaaacacagattacagttcaaacttctcaatttacaaagtaagaaactgaagtcaagaaaagttcagtgacttgacacagtaatgtttgagtttgcaaacatgagaagttacagaaggtattctggaccttctagatcttcaaaataggaaaccgaaatccaggacagttcagtgacttactctaaagagtccgtgactctctctacaacacagccagagctgggagtcagagctcctgtctttcatttttttaatgcagtggcttttcccaggtcttcctgtgtttgttctcctttcaccgaatttgaggtagaaaacattctgttgttcttttctccacatgatctccctgaagggtttatatgcttgtcaccagcaactacagtttctctgaattgttttcaagccccagtggacaaatatgataaaaagaaaaggaaggtaaatatgtttatcaactatttataactcatgtgctgtttacacaagctcttacaatttccaatgaattctcctactccttaaggctatcctggtgagccatccctgcaggtaggatatatatatatatatatatatatatatatatatatatatatatatatatatatatataattttatatatatatatataattttatatatatataattttatatatataataatatgaaatacatattatacataaaataatatatactttatatattatataaaatatgttatatattttatgtattatatattttacatatatatatatatatatatatatatatatataccatttttgctattgaggaatcttttttttattaaactgagaagtcatatatacttgcgtgtctggaaatacatctgtaataactgaccctacccttcgttgccttcaattgtaaaatcatatttgttaatggatttcactttgcaagtctcaagcttttacacagacatattgctttttttcagctcatcacaaagcctatagagataggaacctattgctttaattacagcagagagataatctttacctctctgaggcatagtccaggtaacagacgcctggagtctgcttaccactaaagactttgtgaccttgggcaatgtacttaacctctctacgccttatttttctcttgtgaaaaatgaacatgggactaatacataattgaatacatgaatggatagatctactattttcttttgtgttttccttcgagatgtgtgtgtgtgtgtgtgtgtgtgtgtgtatagtttatgtatttaaaattgtttttaatgttataataatatgccagccactcttagcttgctcatttataattaggaaaatgacatttccccacactattaaaggcatatttttaaaatctttgtttaaatagcctttttcttttgagttatgttttgagaatactgagtctctatttgttgatgttttaagcctttattttaggttcaggggtacatgtgcaggtttgttatgtaggtaaactgcatcacaggagtttgttttacaggttatttcatcacccaggttataaggacagtacccaataggtatttttttttttctgatcttctcccttctcccaccctccactcagaaaaaggcccaagcgtctgtggttccgttttttctgtccatgtgttcttgttgtttagctcccgcttataagtgagaacatgtggtatttggttttctgtttctgcgttagtttgctaaggatgatggccttcgactccatccacgttgctttagaggacatgatctcattattttatggctgtgtaatactccatggtttgtgtgtgtgtgtgtgtgtgtgtgtgtgtgtgtatacatatatacacacacatatatatgcatatgtgtatatgtatgtgtgtgtatatatatacgtatatacatacatgtataaaaaatgtgatatatgataaagaaaatgtgatatatatatacacattcttttatatatgtatatatgatatatatatatacctattcttttggatatatactcaatgatgggattgctaagtcaaacggcaattctcttttcagctctttgaggaatcttcataatggctgaactaatttacatttccaccagcagggtataaggattttcttctctccacaacctcaccagcacctgttattttttgactttttagtaatagtcattctgattagtgtgagatggtatctcattgcggttttgatttgcatttctctaatgattagtgatattgagcattttttcatattcttgttgactgtatgtatgtcttcttttgaacagtgtcttttcaagtcctttgcctagtttttaatggggttgtttagtattttttttgtaaatttaagttcattatagattctggatattatgcctttgtcagatattatgcctttgtcaaatattttatcccattctgtaggttgtctgttcattctcttgatagtttcttttcatgcagaggctctttaattaggttccatttctcaatttttgtttctattgcaattgtttttggcttcttcatcctgaaatctttgccaggtcctatgtttagaatggtatttcctagcctatcttccaaggtttttaaatagttttaggtttaatatttaagtctttaatccatcttgagttggtttttgtatatagcttcaggaaggggtccagtttcaatcttctgcatatggctaggcagttattccaggaccatttattaaatagggagtcttttcccctttgcttgtcatgttgttttgtagtagtagtaactggtggtaagtatgcagcattatttctgggctctctattctattttatttgtctaagtgtctgcttttgtaccagtaccatgctgctgtggttactgtagccttgtagtatagttagaaattgggtaatgtgatgcctccagcttcgttctttctgcttaggattaccttggctatttaggctctttttcttttttggttccatgtaaattttaaaatagtttttttttctaagtctgtgaaaaatatgattagtagtttgatagaaatagcattgagtctgtaaattgctttgcgcaatgtactagtcagggttctctagagggacgaaatgaataggtcagacgtatatatgaaagggagttaactaaaaataactgactcacatgatcactaggtgaagtcccacaataggccatctgcaaattgaggagcaaggaaaccagcagtggctcattccgagtccagaaacctcaaaagtagggaaaccaactttgtagccttcagtctgtggccaaaggcctgagagcgcctggcaaattactggtgtaagttcaagagtgaaaaagctgaaaaacttagagtctgatgttcaagggcaggaagcatccagcacaggagaaagatgaaggccagaagactcagcaagtcagcttcttccaccttcttctgcctgctttatctagccacgctggcagcagagtggatggtgcccacccccattgtggatgggtcttcctgagggtgggtcttcctctcccagtacactgactcaaatgttaatttcttctgttaacacccagaaacacccagatacacccggaaacaatattttttgcatccttcaatccaatcaagttgacacttatccatcgtgggcaatatggccattttaatgatactgattcttcctatccgtgaccatggaatgttttccatttttttgtgtcatatttaatttctttcagcagcgatttgtaattcttgttgtagagatctttcaccttcctggttaggtgtattcctaggaattttattctttttgtggcaattctgaatgggattgtgttcctaatttgactctcggcctggatgttgttggtatataggaatactactgatttttgtacattgattttgtatcttgaaactttgctgaagttgtttatcagatcaaggagcttttggacagagacgttggggttctctaaatatagaatcatgttatccacaaatagggacagcttgaattcttctcttcctatttggatacattttattttatccttctacccgattgctccagccaggacctccagtactatgttgaataggaatggcttggaaattttttaaatgcaaaaaggaaaagagatatatctatacttgcataaccattgaacactttcaccttggcatgtttacttccagaggcagttttccaaaaaaacaaaaactttcagaccaggtatagtggcttatgcctgtaatttcagcactttaggaggctgaggcaggaggactgcttgagcccagaagttcaagacaaacttgtgcaacatagtagatgccatctctaaaacaaaataaatacatttgccaagcatggtggcgtgcgcctgtaatctcagctactcaggagagtgacatgggaggagcacttgagcctgggaggtcgaggctgcagtgagccatgattataccattgcactccagcctgggcaatggagagacattgtgtctaaataaataaatacatacatgttcatgtttttattcaagggcataattgatgaagtccctgctgaaaaagaacatctctcatagcagatttaccttctcattcctcctctcatttgcccacctttggatctttagtatctaaagtatttgtttcaccctgttcaggtttataatgatggaattcttttcagtaaccattatttccattgtgtttacttttatttctatatataaccatattcaaaacataccaccaattattttactacaatgcctaactgggtggctgatgttcttaattgcttagattttgttgttaggtttattctagaaagtgctgtatttcctgagcacttttcataattgacaaagtggatttgtatataaaagattctgtataatattcttgggtaacattactccattgtattctgatattggatattatcatatggaaatctgattccctttcacttcttgtagatgtgttttgattttggtttttctttctggatgttcaaataatttactcttcatcttatatcttatatatctttacgcctcatcttgtatcttaaataagatatatctctatcttttgagatttatgtactcagtttcccggaaacacagtctttcaatctgaaaatttattttcccagaaaagtatcctattctttaactttgaatatatattctgtcccatttgtgggcttatggcatcaggaatgccagttattttaatactgcatcatctttctttgtactctttttttttgtacaaactcagccctaattactttaattccttcacccttctcatttacattcactctgatgatatcgagtctgatacatgttggtaatttgatatttggtggcatctattatgagacttgtactttctaatttatgtattagttatataatgatgttgttttggtccttgattcatttccttaggtccactaactcccttttcatttaattctgttgttttatcctccagtctttgacctctagctctattgaatttattttcattttaaatgaatccattgtgtgaagcaacttgaaaaatttctttgtgtctctaccctatattttcttctggattaagttctttgtttcttaaattaaatctctctcttctcttcctccctccccatcccccctttttctttcactcttttgcattattgttggctgtattatgtttctatatttactatgcctgtcttttatcttgatcatgtgggagtggcactgtccagacattctacttgctctaatgtagtataggttacttctagacttacttgtcatccttcttgggatcccttaagctccagtttgaagtctggatgtttcacgttttgtgtacttttaaataaccaggcatggtaggggaatgagtttagttgaagcagcattcaaactcatttaggatacctagctttgctggctagtactgtctcctactcttgtttgtgggagaaggggctgttctcaagtttccaattagctgttcatttcattgatggtccataagccttaccttactcaaaccaacctccatcccctgtgtgtctcctcaacagtaattgcaacttcttctcaatcagaaaaggaaatgccaggcacgatggctcatgcctaatcccagcactttgggaggctgaggtgcgaagatcacttgaggtcaggagtttgagaccagcttggccaatgtggcaaaaccgtgtctccactaaaaatacaaaaattagtagagcgtgatggtgtgcacctgtaatcccagctactcggaaggctgaggcaggagaagcacttgaacctgggaggtggaggttgtagtgagccgagatcgaaccactgcactccagcctgggcaacagagcaagactccatctcaaacaaaatcaaaaacaaacaaacaaacaaaacaaaacaacagaaaagaaaaggaaaacttggggctattcataattttgcattcattgatgttcggcggtgttagtgagaattcttagactttcccccaaatttcaggaaaatttctggggtttaagggaagataagaaagtaaatcctttttctgttttactccagaaacacttgttttgattttgttgtttttatttgctattgctatgctttcttttcattctttgactgctgtgggtgatttttatgtgtcgatgtatatactaggatttactttttatttcattaggaattaagagagggaaattcagttatgtgttataatctaccattccctcatagaaaatctactaataagaaatgggaaaaacaaattttctattatgttttagtgtacttctgtaatgcagttaaaaagacagagaaatagttctcatgcatgacagaaacatttattctacgcttttagaatagccacatcttttcctctcaaataccaacagggaatactagaaaatatttgactgaggaaaaataatagctctcaaatttctgtcagtatgcattgtttgggaacaggataatttattttggatatttattatttgtggcatcaaacaacacacatgatttaacacttaaatcttgttttccttaacatggtctcatttagttcacagctaaaacagaaaattcgacaaagaaagacgtttatcaattgtatatgtatggatatatatttgtgtgagtctatgtgtgtgcaggacactttattctgtgtgatcatatattttatatagaagaagagtggtccctcagtatttgtgggggataggatctaggtctaggatctcctgcagataccataatctgtgaatgctcaaattcctgatatataatgttgtaatatttgcatataacctacgtcaatcctcccatatattttaaatcatctctagattactcatacttaatgcagtgtaaatgctgtgtaaatagttattaagctgcatttacatattttattttttatagttgtattgttatttttttatctgcagtcggttgaatccttgactgtagaacccacagatatatatgaaggaccagctatataaaatcttaattctcattagagaatgtataaaattatctcatatgagaatatatatataaatataaatatgtgtgtatatgtaggctcacacacacacgcaagcttaattgttggagagttgccaataactatcaaaagccatcaatagcacatgaattatttccagccactatattaacaaaagcgtagcaataatgtcagtaagtatatagaatttggacccagagataatcctcccattattattatcacaggcttgaacctcacaaaattgtgctctcagtttgatcctaggctccacaattagagagatggaaagcttagtctggatttagaaagaagcaactctgattacaggaagagctggaactaaggaagggcaatgggattatttgtctggctaaagaaaattgtgtggagagatctagaatcgtttcctagcatatatgaaggacactaaatgttcttcattcccacagcacatacagctgaatttttagatagaagtgtttctcagcaaattgtgctcacgagaagtatactattagggtttgaaaataaaattcaaaggtctaacattttatttctctaggattattaaaatattgtcattgccaatgatagcagaatagcttactatttgtcctaatattctataggtgccattggtatgaactttagaataaaagaatccccttatatcttaaatgttgttccccgcttagattttccaaagcgattactcatctgcagccagaagatgactgattgccaagggatttgccgttgaggactgaactacacttatgcctggtcatctataaatatttatgaagcacctatcccatgcttggccttggggacacaaagataaataagacaatccatgttcttaaggcgttagtagcttagtgaattcatatccagattgatgccacaatgggatgaattgctgtagaaccaactgcttttctgtcatgtggttttcagtaataatatatttactttcatttgagaaaacatgtataaaagtaaatatcccacttgggcttacacctgtgtcaggaaaaaagttaatacatattccagaaattgtcagagcacccaagcacattcccctcatcatggaaataatcactgccagatgagattgaaacatcttttggaatagaaaatgcttagaatgaaatccataccttgaaatccatttttctagtacagtagaagggccattcattattaatagaatgtaacttaagtatgcttttatttccaacgtgtaatacattctactctcttaaggctagaaaccaacttaacctaaatgtttagacagtatagtcaggtatgtgtgagagacactcgtatggagaatcaaatgcaaatctcaacaaccaatcctatgagagagtacagatatgtaggtaggagaaagtaaactagagagaaatattaagcagacttcaagtcacttgtcacgtaagaaaaggccgggagagaagctctgaataggacagaagatgcatcatcacagcaccttccttaaaaaagaggggaaggaaggagtatgcatttaaagatcaagttagccaaatacaagttactttggcaacaaaagttggtgcaggaagaatagaaactatcgggttgcatttctcatctcacacttgacaagtctcttagaaataccgttacctagaatgagaattttgttaaggtatgtttaacatggaagcttgtatttataaagaatatttttcctcttaggtgtattagtccattctcacactgctataaaggtactacctgagattgagtaacttataaagaaaagaatgtttaattgactcagttctgcatggctggggaagcctttggaatctcacaatcacggcgaaaggcaaaggggaagttagatacatgtcttcacaaagcggcaggagacaggaagtgccacagtttaaaaccatcagctctcctgagaactcactatcatgagaacagcatgggggaactgcccctatgatccagtcatctcccaccagatccctttctcaacacacggggattacaattcgagatgagatttgggtgggcacacagagctaaaccacaccaatatgttatctccaaacctgcattcaatgccagatggcttccttcgtagtaatctgaatgtggttgcatgtgaaacaatggctccttaaagtgaaattatctgtttatactattttgatactgcacttgaaataacccatttgttttggatttagaggtagcccaatttggcagcaaactcatcctagacatttggtgtgattagtcttttcaaatatatgcattccagagaagattaatggccttattatgtccagtatttcaacaaaaatgaacaaatgaagtccaaaggcacatggctccggggaaactagctggctttccactgttctcagggcagaatcacagccactcaaagattatggttatttttttttctcctaataaaatctgttcatcaatctggttttttactcagtttgtgttgttcagtcaccagagtggtttgtgctgcctattgttaatttaaaccaactgcatggttttaaaaatgcattctttgtcatttcaaagagctgtggtaattctttggaatatagtgttttcaaagttcagataatgcagagaatactatatatattacagtgatattttaaaattgacccatatttattacatacctaagtaactggaaaagaatagctgaatagctaagtaacttctaaaagtaaaaaaaaaaaaaaaaaaaaaagcaagtcttcacctatatggggtgttgctgaaaatacttatgggcatttattatgcgaaataaaacccataatactatttaagctgttgatgatgactttgtttggagctcaaatcacagaagaaatttcattgtacagaattcaaatgggtagtcatggcatagaaacgtttaaaaagaaaaacagataaatttaaagaaaacttttacccaaatttaaggtttgcctgtacaactcttaacaattgcagtctggaagtctcccttatgtattatacctttctaaatatgataaacacttttaaaaaacagaattatattttttctacatttctatcacttattagttttggttgggattccttgtctcagccccccataaaaatgattctttatgtatatactagaagtacttgcaaaggtcctaggaaacccagatctgatggaaatgtggacaatttatttctggccatggattttattttattccagagaaggaaagtacaactgaaatcaatatcttgcctgaaattcttgaaacattgtacatgtgtatgaagcttttctctgaaatggactaatactatgtaaatggaacaatttgataaacttaaaaattcatggtacttttattagtcattaggaaattgctgccaaccaaaaagcctaaagtagtgaaatgagtccttccacagaagtgggagaaagcgtaatgtgcaaagggatttaaaaaacaaacaaacatatgcttcaggctccatctttaagaaccttaatctggttggtaaatagtgatatatgtgaaagataacttatataataagtagtgtaaaagttgaccacagagatagaccactgcaagaagcagaagaaagctactctcagcttcatggaacgttatggaaaagggatatgtgagctgcttcttggagaataaatagaacatataacatctgaggaatgcaattccagacagaaatccatggccagaaatgtgctgaagaaatatatccatggccattgatgaatcatattcactctttagtcagtttttctatctgtaaaataaaacaattatattaaatcatcctaaagagccattttaactattatatcctgttttaatagcaagtagaattagtttaagtagattaaatgatttctacagaaaaggaatgagaaaaaataagatttgagcagggaagtttttaacctctgagttattaaatataaagttacaagcttggtctttattctgtggacattgaaagctcattgacaacattttgagaacagaagtggtataatgaaagttttctcataattttttaaaatggtacttcccattaccctttaattagagatgactttatcaatttgtgttgagaatataggactccagagctgtgaatagtataacatgattatactttgatcctaaattctaggaagcaatcccaaaatgggacaaatagatcccagatcctagtctgatcatcactgagaaaaaaacagagatcaaaaaagggaaaattgggtaaactttatttgtctgctgccttgcagaatagtgtaatcatcaaaaatatattcagttacatattgatttcatgttagcctgatagagccacttccactgagaagtcacatactagtgtcaagataaagcacatgcacaaataaatacagtgcagaagaaaccaagtcttaaaataaataccacagggtttccaaaaggagagaaaatttttcaagaaaaaatcaggacatccttcttggagaagtagcctcatgaaggataggtagggtgtctgtattagtccattctcatgctgctgataaatacatacctgagactgggcaatttataaaggaaagaggtttaattgactcacagttcagcatggctggggaggcctcaggaaacttacagtcttggtggaaggggaggcaaacatgtctttgttcacatggtggcagcaaggagaagtgtggagccaaagggggaaaagcctcttataaaaccatcagatcttgtgagaactcgctcactatcatgagaacagcacgagggtaactgtctccatgattaaattacctcctactggttccctcccatgacatgtgaagattatgggaactataattcaagatgagatttgggtggagacgtagccaaactgtatcagtgtatatattatagagtgaaacagtaaacatttcagggtgagaaaatagaatttacaaagacttagaattagaaaagggtcatttgtttcattgagccatggggtatatgtaagtcacgtgtggatgataagtttaacaagtaagcagtaatttggtcatgtattatttaaaagaaaggcagaagagctttaacctaattcctaatccaacccaagcctgtatgtttagacctttttaagaccctctcccatgttatgtaagtattttaattccttttgctcagcgaacttggaagatatgctttaatatttctgaaaagtattctaaaataatcaatacccgttattttctctaaatagtcatggtacctcattcttcactctttattttttcttatcattaattgacttttttatgacaagaaaataatattattttgtagatatatcatttccatggcattatccgaacttcttctactcatcttctaccaatattgccacagcaaaggatgaaaatatgcattttgttgcttgagttttttattggcatcagtagcaaatctttgttgagcatgtactaaggatgaggcattgtactaggcattgagatatggagaaaaatccttagcccttgtctttatgatatagtccactgatgactgataacactgcctaatagacagtatatttcagaaaacatgagacttagactcattttttttttttaagacagagccttgctctgtcacccaggctggagagcagtggcacaatagcggctcactgcaaactctacctcccagattcaagcgattctcatgcctcagcctcccaaatacctgggattacaggcatgtgccaccacacctggcttatttttatttgttgctgttgttgttgttgttgttgctgctgtttagtagagatggggtttcactatgttggccaggctggtcttgaactcctggcctctagggatctgcccacctctgcttcccaaagtgtggctgagccacagtacctggttagacttagactcatttctgattcacaatattgctgtttggtacttcaactccccatttaagtgagaaaagttattttttcccttgcctgctgtctgatatactgtgaaagttagagaatctgaatagaaataaagatatcaagatagccagagaagacaaggtgtccagtgtgatgacggaagcctaagaaatatgagaaaattacaaaatatagattagaactcacatatacgtttgtaatcagggaaataattgttgaggcatccctgtggtacttaacaatattacaactataataatacggctaaatcagattattttccccttggttaatcagaaatcactctattttattaatcaatgtaagagaaggttttagggattcactacgtgatcagctttgctttatttagttccattgagagataataaacaggaaaatgagtcctacaaccccaagttggaaaaacagtgaatctgtgtgaaactgttagaaaacagcaatcacttaaactcaatcatttgttttttgagaaattctgttatgtagagcacactatttttgacattgagaatatagaaaactactctaattggagaataaggaaataacaaaattgaaaaaaagcaagaggctacatacatacacataaacagacataccacatttatgtattttagtatagttacatacaataattatgtttgctaccagtgatgtattgtaatatatttttgcatttattttatttatcatgcaattatgcactgttatttgcaaacattaactgtcattattctcaattcttatctcgaggttatagatgaggatagtaacagaggcactcgcagtgagagaaggacttgagatttaaatccagcccaatctggctccattatttgggctcttgaaacttctcttttctcttcttcaatataaatttggtgttctcttctctccctttctcttctccctctatattcctaatcctttctattcctactctctctttctctctctgtgtgtgtgtttgtatacatacgtaaacgtatatatttaaattttagtctcaacccagtcaattgatttcaagttctaatggatgtgacccaaattttgaaaaactctaatgtagacataatgatttcagaaacagaaaggatggatagattcaggtaacttttatggtaccaggaaagaagaacttaaataataaagggaaaggagggttagaaaggtgattttatttaatgactctaattgcttatcacaattatctctcaggctctggaagtattattgcagtatctttctgccagaagtttcaagtggcaaaagagacagttatagcaaatcactttagtacataggcagggaatcagactgtctggcttcataatttacaagctgtgtaatttggggaaagttatttaaacaccttgtacttcaatctctccatttgtaaagtggggataatagaacctgcttcaggtagtgggagagataataataaatataaagggcttaggataataaactctgcattgtcagctctcaataaatgttcggcattgggtattaaatgaacccttgaccaaagtctttgggaaaacagacagcagaatggaactgtttccatatattcaactaatacttctgctcagaggtattcaagtaatatttctgatatcttttggtttattgtcagtgaatttgactaaggaatcaaaaaagccttatactaatatcatcaataattaataaataattttagccaagttgtttagaggtccaaatattatttagttactaatcagggaaataataaagaaagagagagatcattcagtaggaaaaatcaggacttaaatcctgagagtttttaccagctcttttatttttctagaaggcaatggccatcaaagattggacattagctttggtgtcaggagaaagtttttctgatggctgttagaaagagcaaaatacagcagctacttaggcaaaaaattagcactcatcactcactgagcataacaaaaatgacaaaaacacagtctacctttggtaatggctactaaaaatacctatccattttctatgtgaaacagatcacggctgctacttcactgtgaatttaatctggcttctcagtcaatataatatttaaatctgatgtcactcttaagtttccccacagaagagaataaacattaatttttagaatttctttctcctaggcaaggttttgtgggctaagcctgagccaagtcattagcaaagatgtgttatatttataattttcattcaattgcaaatttccatcatagagtaactagtgttacgataattaagaaatggaattaaattagtatatcacatgccatgctgtgaaaattataatacagtatagtaatacactacagtagataattgctaagacaataagaatgtggccacagtaaagatgatataggcattgtgtagttccctatcaccatagccagtttcaacagaaaatgagtccatcacattaatcctaatgaaactctagaattacaggacaactgagctttcttatcttatcctctgggttgtctcagttccaccagcttccctttctttactttatcagaatagtttccaaagacttatgtacttttcagtgtgtaagtcaattgggtacataacacatggatattcagaatgtttattatgtatgttttttttttccaaaaagtgtttccttttttctttccttgtggcagaacaccactaactgcaactgtttaactgcatttgggggaacaaaagatttgttttataatagttcctgtataataagctaagagcttagggaatgatttgaattataaatattttctatcccagagcagtgttttaaactcagtgaagacctcagcagcatgcaagttcacatccccacccactcactcacttttttttttctgtctttgcagttccgccatggtttttaaatcatccttccaacctgtatgcctatgaaagcatggatattgagtttgaatgtacagtctctggaaagcctgtgcccactgtgaattggatgaagaatggagatgtggtcattcctagtgattattttcagatagtggtaattattttgtttcatatttgttttataatcccattcattgttttctatttttttcacttgtttttatttcttgaaaaaaaaaaaaggttccctgttggagattttttgtgatgtgttaaaaaagttattcaaataaagcaaatgnnnnnnnnnnnnnnnnnnnnnnnnnnnnnnnnnnnnnnnnnnnnnnnnnnnnnnnnnnnnnnnnnnnnnnnnnnccccctggttttacagacaagactttaaaacatacaaacaaacaaaaataaatgaaatacagacagcctaagtatttctgagtagtttcacagtttcactgctggtttatcaaagagagtttagaacctagttctagacttaagccaagaatcccttacttctttgacttttacccattttaatacagttttataagatatgatacttatgattatggaagtcttcacttggtaatacagacagcttttttttcctaccctgccctgtaggaccagcttatcctacatgagccattgagaaaggcagtggtgatgtggtaatgaggacagtgggtgctggtggcattggtggctgcagtcataggccatgaagaaccagagtacacattgctttgtaatttccaatactggaatgaattgaagctaagaggaataacttctatggtttactataagttttagttcattttctatccctattgtgggagataatagggatagtggtactctattcactgagttgttggcctggtacacatggagtgctcaataccttccattattgtagcttttgctgttactggcagaatgcttgtctcatttggaaatgctctatgaaatctcacttataggtataggttagcattggaggttctgattttaggtatatgaatatatgagagcgatgtaaagttcttttcaaataacaaagaacttgcagctacagaagagggttttaggcctacttatgtttgagatgcagacatgacactttcaaagagctgtaatctagccaggtctcctgggcagaatgagactagagcatagtcatcctatgagtccagacacaagctctctccatcgtattacaatggcctttgttgcaaagtgcctcttccacaatcagtcgactttcagaaactttcataatatctgtgtgcatgcatgttggcctactataaaggttcttaaggaatacatccataaaggacattttatcacttttattaccacttattatttttcacttttagttgcatttgtttaattggttagaaatagagtaagaaagataaaattttaacttttaaatgccacagtgatccattatttcctttaaaggcgatgttatttccactaccactgaattaaaaatgatctgccaatgggcactttaaaaagtgttgtatacgcctaaaatatatgctacttacacttaaaggacatttttcagtgcccttaaggacgtattgtaaaaggcaacatttatttttttctacattttgaatataatctttctcccagcatgactcattacagccaaccaatttaaattcttcttttataggtgaaagaaaatgtaaggtattgcccgatttgcattaaattgtgcttaaaaatatttcctcaacagctccagaaatttgagagccattttnnnnnnnnnnnnnnnnnnnnnnnnnnnnnnnnnnnnnnnnnnnnnnnnnnnnnnnnnnnnnnnnnnnnnnnnnnnnnnnnnnnnnnnnnnnnnnnnnnnnnnnnnnnnnnnnnnnnnnnnnnnnnnnnnnnnnnnnnnnnnnnnnnnnnnnnnnnnnnnnnnnnnnnnnnnnnnnnnnnnnnnnnnnnnnnnnnnnnnnnnnnnnnnnnnnnnnnnnnnnnnnnnnnnnnnnnnnnnnnnnnnnnnnnnnnnnnnnnnnnnnnnnnnnnnnnnnnnnnnnnnnnnnnnnnnnnnnnnnnnnnnnnnnnnnnnnnnnnnnnnnnnnnnnnnnnnnnnnnnnnnnnnnnnnnnnnnnnnnnnnnnnnnnnnnnnccatacaataagacccacatgggtgtaaaatattcaccatactcccctctccaaaccccaaaagcttatatgtcaaagccatcacaatatttaaagaatttttagatatttttctgggcaaacgcttccagaaaatatccaactttgatttcttgtcctttagaattcacaaataccagtatttataccctttcttttttttcctgagcagctactaaacctgaacttccttcaataacaagtaaaagaatgagatttcttttcatggtaatctttgttgcttctataattaataaaatacttgtctgttgactgctcatttaggtattgaggatggtgcatatttttgtcagcatattatttaatgcagatctaggttaaactgatgcctgtgaattcagaaaagaaaattgggaaggtatgacttttcccaggtggcataggacacgtctgcgaggctgagacccctcatggcctctcctcttgtttcttctgtgctgttttatcaaactttggtctcatctaagttcattttgtcaccttgcattttttgctttctaaaatactttacctgctttttcttttccctagggaggaagcaacttacggatacttggggtggtgaagtcagatgaaggcttttatcaatgtgtggctgaaaatgaggctggaaatgcccagaccagtgcacagctcattgtccctaagcctggtaagacaatgggaaccttgctttggtacctggaatgaaaattattcatagtctgttggtaaaatccatattgtttttcctacccctcaagggcaatatggcaatatgaaatcatttagttaattaaggtgtatacttgtgtattgatgacattttccctctagaaaattgtgtgtgtacatgtgtgtatatatatatatatatatatatatatatatatatatatatatgtgcatgtgtgtatgtgtgtgtttgtgtatatatatatatatataaaatctccaatgagataaagtcatcatgaataatagggcctctgcttttcaaggcaataaccactaaattattaccttctccctcttttgtggcctgcctttcttcccagcattccatttaaatataaaatatataatatataccttgcatatatgttaggtgtatattttagttatatatgtgcatatatacgtacacacatatctataaatatatatacataaggactgtacatattttcttatatgtaatcttgaatcaatggaagttaattagtgtattagtctgttctccactgctatagagaaatatctgagactgggtaatttataaagaaaagaggtttaattggctcatggttccacaggctgtataggaagcatgatgctggccatctgctgggcttctggggaggcctcaggaaacttgagattatggcggaaggcgaaggggcagcaagtgcatcttatgtggctggtgcaggagaaacagagaaagagggggaagtgctacacacttttaaacaaccagatctcatgagaactcagtcactatcaggagaacactaccagcagggaaatctgcccctgtgatctaatcacccccaaccaggccccacctccaacactggggattgcaattagacatgagagtttggtggggacacagattcagaccatatcaaaaggatcttgaaaaattactctttttaattataattgcaaaaaatgtcattttgttttatagtcttttggaagcttaatatattgctgaattacagaattctagtataagtccgggcacagtggctcatgcctgtaattccagctttttgggaggccaaggggtgaggatggcttgagaccaggaatttgagaccaatctggacaacatggcaagactttgtctctactgaaaataaaaaaaatatatatttaaaaacaggcagccacctgtagtccagctacttgggaggctgaagcagaacaatcgtttgagcccagggtgttgaggctgcagtgagctatgatcacactactgcactacaacctgggcaacagagcaagactctgtcacaaaaaacacaacaaaacaaaaactagaataaattgatactagacctgtcatgtaacagctctataacaacacaatttcttgggaggagagacaaaaataaaaacaaaagaaccatcctgctgctctgaaatgattaaagaagtttaaaacagggacaagacagttgttaatacagatccaaatacttcaaaatgttaatatctcccataaagagttatctatcatgttacatacatttcaactcttttggaccagttttcttccttttgacatggctcgcttttgtgttaatcttttcctgaagtaagtttaatagaaagtaggaaaagcatataagacatagtctttctctggcttttatcatttaaaatgtgcctattaagtccttatattgtatgcaccccagccagttagctgaagattcacagcagtgctcacaaagatgactttctcctatttccttgattgaaataaaaataaaataactatagaacaacaataccagatgagtcaagaagctaaaggaactatgtaggaattaaaaggagcaattaactctggctcaagatcaccagtttctctgatggacttcttttccctccatttgatgtgcttaagtgtcagtgtaacttcattggtgtgactaagtatattattttctgctgaactagtaatggataagtaggagaaaaggaacctttaaaatcagggtctctaatgtgagccacactttttttcttttaattttattattattatactttaagttttagggtacatgtgcataatgtgccggttagttacatatgtatacatgtgccatgctggtgtgctgcacccattaactcgtcatttagcattagatgtatctcctaatgctatccctctccctccccccaccccacaaactgtaccatatcattagtaacaaaagtatgggtgcctttaagctgatattggctgctacgccagtcacagaacaggagaattgtaggtgagtttgatttttcagctaaggccataaagctgatgacaatgcaagataagtgacttcgtgtttctaaaggaggtgtaagatgtatcctcctagcacttggcactgaccaaagaagtccagtgagcatccctgtacctgctcacagggagggaggattctttgaagtgctagaattcataggatgagaggttgtcatggtattttctctcctgtaccagccaagttatacagactccaagaaaaccttttagactgtgtgtgtgtgtgtgtgtgtgtgtgtatgtgtatgtgtgtgtgtgttgctggggactgattgcaaaaatgggaaatgggcaactttattctgctatttcatggtctatacaaacctgcccccagtgtctgaggaagctgagagaccaaagaaagaggctgacaaatctagtttcttagaaatacttaatagggacttatgaacaggagccatatctgtgtctctggcagtgctgagacaacatggtggcatggggatgccactagcccccagaccgagggcttatataccatggggagaagtggttttgaagggaagtgtgagatgatggaagtacagtaacaccaaagttttctgacctaatggcaggatttatggtaagtacctgctgttacacaaggaaaattgataaacaggaaatcttagaggccttcccagaagaggggttaatcagaagccaacaaacatggtggattagcttcccagatggagttgctttcgcctccacactggctggaaaccacctggagctgtccacaatgcagggaagagaaaggagaggacaacattaagaagaagctctgtttcgacccttgagaagaacaagggtgtcagttccacttgaagaaggcaaggctgaaggtttcttgaaaggacttttcccaagaggtcctgtctgctgaggctgtgnnnnnnnnnnnnnnnnnnnnnnnnnnnnnnnnnnnnnnnnnnnnnnnnnnnnnnnnnnnnnnnnnnnnnnnnnnnnnnnnnnnnnnnnnnnnnnnnnnnnnnnnnnnnnnnnnnnnnnnnnnnnnnnnnnnnnnnnnnnnnnnnnnnnnnnnnnnnnnnnnnnnnnnnnnnnnnnnnnnnnnnnnnnnnnnnnnnnnnnnnnnnnnnnnnnnnnnnnnnnnnnnnnnnnnnnnnnnnnnnnnnnnnnnnnnnnnnnnnnnnnnnnnnnnnnnnnnnttcccatgagtgtggacttttgaaaggacaagctgagaaaaacagtctttgtctctttattccaaatccatcctcccctctctgaccctgaggaagccctaaatagaagggagaagcgacctgagagactgaaacacagatgataggcagtcctactgcccccttccctatttacaatctacacttgctttgagagatggaaagaaattttaaattattagttgaatattttaatttagatctcattgaggtgtttgtgtgttgtggggttggggggggttgttattgtgtggagttctgtttgttttgtttttgaatacctgaagataaagcttttttttttttttgagacagaatctcactctgtctcccatgctggagtgcaatggcacaatcctggctcactgcaacctccgcctcccaggttcaagtgattctcctgtctcagcctcctgagtagctgggattacaggcatccaccaccaagcccagctaattttatttgtttatttatttattggtattttttaatagagacagggtttcaccagattagccaggctggtctcgaactcctgacctcaggtgatccacctgcctcggcctcacaaagtgctgggattacaggcctgagccactgcacccagccaataagggcttttaaatacttacctcaccccagggccagaggatggacccaagttacaatcagggttgggaagacagagctgacagtgtgtgtttgaagacggatgacagcagaaaaataaaaagctatttccttctaatttcccaatagttgagcttattcagtcaacccattatagatgttcaatttcacttctcccaggaactctacaggtagcctttaattcatggtatcttgcattccacttgggccctgatttgtttaggtctatgtgaccataaagtgtcaaggctctcctgagcagaaatggcgtttaactcctcactagagcccaggaaaatcttgaaaattcatttattttccatctagatggtagagtgttgtcagtggcatctactctcttggtcgttgtttattgtatttggcattggattcaaaagaaagtaaaagaaaatgaagataaaaatccgaaagcgtgacaggacaccattgtgactgtcttatatttcccccttacacatgatggattgctttttcctggctatttaatcaggtcttcaaagaatgccactccaattcctcagagatgcagcacaggccgcgtgcacagatggtagagaggccagctataaattaagcaatgaggctgaccatggtgggaagaacatagccctctctgtttaagttttgacaataaacggtcaccatatattttgaagtacattgtgggcgtgcattacccagctgttcagctttagcctgtccacaggggcttgtggctgagagttactcttggcaaccataacaatctgcttctcgctggagtacagacaatgacctatttgagccagtgtctgtagttgtcggatatttacataagcctaatgaagtttcaacatagtcttttatatatagttacctattccctctttagcagttagtgacttaggaaataaaatgaacataatctgctgaattaaattgagtgaatgacttgtttttctctccagaaaatgctagggaaaaatatttgaaatgtatgcattttcaaatgtgaaatgtatacacggtttcctctagataaagatcaagattaaaatcaagaagatcaatggtgtttttaaaaatcgttacactacaggaggttctatcaataatggtacataagtaacataatgccatacacacagtgctatctatgcaattatttattttctgtctctctctatagaacacatgcacaaatagaggatggattcctgcacacatgagactttgcatatattacattaaaaatatggagccatattatgtaagcagtgtgatggaaagttaattcagtttagttgatttatatgatgtgtattgtttattaatctctccttagatctggggacagagttttattgttgtttgttttaattaatttttgaaggggagggcaggatgttggctaagaagtctcctttctaaataagacattattactgcaagtatactattcagtgaatagtctagcaaaaaatgggttaagaatcaatgtgttaggactgggtgcagtggctcacgcctgtaatcccagcaccttgggaggacaaggtgggcagatcacctgaggtcaggagtttgagaccaaactggccaacatggagaaaccccatctctactaaaaatacaaaattagttgggcatggtgacacatgcctgtaatcccagctacttgggaggctgaggccaggacaatcagttgaacctggagggcagagattacagtgagccaagatcaagctactgaactccagcctgggcagcagagtgagactccatctcaagaagaaaaaaaaagagtcaatgtgttctgtgttacaagaataagaagtttcagtagccagagttgcaaacaggtaagcaataagttaggatcccattggcatactggatggtgataaattaattactcccatgttaccatccaataaattgtagtgcaggtaggcagtaattaaattaaggaccctgtttggtagctgagtggagaagttagcaattatctggagctggggagcaggagatggggagcaaggcaggaacaaataataagatgaatttaagatattagttatctctgagtttcttatcctggttctagatgttgcatggcattccgttttctgacagtgtctgcagcggaaggttgttggaagtacctgactgctgagcagggaagtggagggccgtggaactgggaatgcacctacgataggggcatacgtagtctgggatgtgtttaatatagtggcataaatgcgtgaagacagaataaagttgccatgggaagaaataatgtattcattatattctaccatgcacaaaatggctgtgggaaaaatccatataatcataacaagaataaatgctattatagatatttcccaaaatgttggtttgcttgggcaagatatagggtctatgtcttatgttaatattgcatatttggctgtgtggtggagtagacagagcacagactttggagtcaatttaagtacaaatcacagctctatcatatattagctgtgtgacattaggccagacacttaactccaagccttaatattatatcctgcaaaatgtggatagtactatctatgccatcaatttgatgggagaattaaatcagaataatgtaagcaagacacatatcacatctaccacatagtaactgctcaataaatgtaatctgcacatttgatcttccttcatctaagatatacacctgcttttaagcaagcatggtttcttttattcatttgtcaaatatttttgtaggcctactatctgctattggggaaagtaaattgaaaatagaaaaagagataaatttcccactttaaaaaataatcacgtttttattggaagaggaagacaaataaaaaaaaataaaaataggcccggcgcggtggctcaggcctgtaatcacagcactttgggaggccaaggcaggcagatcactaggtcaggagatcgagaccatcctggctaacacggtgaaacctcatctctactaaaaatacaaaaagttagccgggcgtggtggcgggtgcctatagtcccagctacttgggaggctgaggcaggagaatggtatgaaacctggggggcggagcttgcagtgagccgagatagcaccactgcactccagcctgggtgacagagcgagactccgtctcaaaataataatgataataataatgaagaataaaaaaataaatgctggttttatttttttccctctaacattggttaaaaaaaatagtttcactgtagtaggggaaatatattggttagacgtttagaaaaatgagaagcattatcaattatctgtcctcccctggaaaaggttactgattacaaatgatgttgaattttaaacattttattaagtcagtatatcatatagcttggaattcagaagagtcaatcatgaacatcaagacgtaaaaccagaagtattttatatctgttttcatgagttgttccttatcaatataagaagaatacctagaaatccaaatggacaaaaggaatatactaataaaattgtatatatattataatataattacattataattatagtgtttcctactacatgttgattctgacatactaacttcactgagattcagtgtgaagcaatgaacattgaataattagttcaattattaagatctattagaatttactttttcagtgtaatagcacctaagcaactacgtatgagagattgaatctaaagggctgtacttcttactttgatattaactactggtggagaattaagttaaattttgtctcttatatgagaaaagttactatgatttaactgtttcattgtgtttagtgtaggatcaaattgtccctggagttctgtaactaatctagaagagccaatttcatgtgccatactacaatgttaaccgacccaagcaggtaaatgggtccttatagtttcctcacacaaacagagatgctcgttaacactacaaaattcctctttaaagttccatcattggtccaaatgcataaaagtgcaacttaatatttttgaaacatattgcagtgatattatagctcataagcttccctagaacgttttcctttataagccttggtaattaattgtagctaagaagatacagagccaagttttttcaaagtggctttgttaacttcagcatatctgatggtacatttattcaataaattgtaaaattatttttgcttataaagttaaaaataagagaatagtaatgtatttttttttattttctacttcaaagtctccctcccgttagagaaatgttgacacccatgctaacattttccctgagtgattcattgataatctaagtttggcataaagcagtcatttgatctttgaccatataatactcacctagtgtatgagatgtgtccacatctcatttctacactcttatccagtttacttgtagagatttaaaaatgtattggaatatagtgtatatttatgaagagattcttaggcaatattgcctaacctttccaagtctctatttcttcagctgtaaaattcagtagataattgtctcaaagatttagtgcaataaatgtttgtaaaagggatttgtgggctgtaaattgccacacaaatgttagctattatgaagtcttttgttggttttgtttagtctcaagaaaaatagcaggcatttattgggatggataaaatgatagctttcttctagcatatttttctaccctacaagaaaataattagtaaacacatattttaatgacaatgtccattcaaaatttaggtttttagcctagtggacaaggttaagggaaaagtcctttttcaaaatgactgctagttgaaagatttgcagcacggtttgcagtatcagtttaataatgacttgctcatgccagttttatgtaggcagaggtttctcagcaaataaaggcttgtcattcaccttgtccttcattcagcacgtgcttcaggtaggaagccagctcagtgctaatcaagaggatatggctgtatggcagactttgaaattagaaatgaattctgcagtaatatgaatgtactgagaccagtgataataataaatccatacaatatggaaaacttgatagattcataaatattgatcacatcatacttcagtggtaaatataccagagtgttatcccattttttttttttttttttagctctctagagtagaaaaagcggaagagaagaatgctggtttttatattgaatccaaatgattttgactttgaatttgttatatttttatctttcacctgtatatcaccatttgatgaaagatgtgcgagtgcacacaaaacatacatacatatagattatatagtatgtagatgctgtgcttatatgtatacacagaaagagatatatattccttttgattagagaagtcttatttcctggggaaaagaagaaggttaatgagatgaactgtaacgcccaccagtgcaactgcaactggtctcaaggctgcaattggtactatttccctcctgctacccgctgtaaattcctcttactctcagctagcatctctgctagtttctgtggcttacccaaattcctgtccctttactggtcatatatgctgtactagccaatacatgatcaaaattggggaagggagtatcaacagatactccagtagatcatcagaatgccaatcatattttccttctttcccaactcctcttaatgacctgggcaattattttgccaggatagtatcctgccttgcctgctggtattttggcacaagacgtatgatacaacaaggcagcagcaatagctcaaatttcaatgatagaagcattcctcctttgtgaattaggacttctgagtctacaagcctagagtcatagggatggtaaacagagattctccaaatgggtcactgggagtcatggtaagcagtttcatacctactttaatctcttgtgtttgtttagtctacctattgaggacatggtaccatatactggccattgatctagacatatactagaccctagaaaaaggtatcccttttgcttagggtatggtctccagcctggctccttaattccacctctgaaggctttactttggctgtatcaagtcagcagctgttgttgatatgtgataggattagtagatcccgtggcaatgcatttatgcctatacctctttttctgtagagtaagttatttgattcttttcaatataatgagggattccatgttggtctcaaatactttgtgagtctgagatggtggtgccggtagaagccctgagaataggaaaagcaacccatttccagaatatgtgtttatttcagtcaagatgaatttctaaccttttcagaagagaagtcatccaagtaaatatgtcacccagagactagttggttttcttaaggaatagtgatttgttgggagctcagcatgtgtctctgttgctaggagattgggcatacagcagtggtggcagcttctggtgagtagcagaaaccatgtaggattagagcccatgccagtgagcaatgcataggctccattcttgcctctgtagccttatcatttgtgcacctttatgccaccattggatgctggctgatgtcaacaggctgaattgttccatctacataattgcttagtgactcttccataaattatacaatctggtgtttacaggggattcaaagatttttttttaacttggtgttcattcctgtgggcctatcaacatgtcttttccccaaacctttttgttcctgatctttccatcattggccaatcagccaagctatttgaccttgttcacatgtatatatatatatatagtcctaccttgagccatttataatttcatataaagtaggtggtgtggtatactcaacattctaccttgggaaaggttctctttaccactttcttttggggctatccctcactgagctgcagtgtagcagccatccaatttggggtgtacccacatacccacagaccaagctgaccacctggtcataagtgtgagttaaaggggaaggtagttgtacaatagtgattgaaaacatggaggtctgggcccctcctgttatgtcctctggtcccgtttttccctgatgccaaatgtaattcaccccatgaactgatgatggtcctgtctgaccttataacttggtgcatctcagagaagccagggtatgatgagcagttctggtcagtggactctcccatggttatttttctcttactttgtgagtagggaaactgctgcacagaaaagttaactaacttgtccaaggtcacacagctagcaaaacatctgacttttcagcctactttctcagccattgtgttataatgggtctgtctacccaggctttgtccacacatggaggcttctcagataaatgggtgatatttcaggtttatttgagtctaatcagactagttttagaattactaataaaggttaaacactggaaattaatttttaaagtctaggattctgccactcaaatgatctctgttcaactttccaatatgatagggcccattgctaagtgtgggttaaatgtgtgaaccgtcttgaggtgaatatcacataattgttgctatccagaaatccatagtttaacaaagagtaaattcgatataactaatcttaattatcaaatgcaattaaagcatagtgatttgcaatgctatattcattattcaatatttatcgagtacccagaaatatataaggaatcacaaattagagtgttgtgatatgcacttgcagtcccagctacttgggagattgagatgggaggagcacttgatctcggaagtttgagactgcagtgaaatatgatggggccactgcactccagcctgggcaacagagcaagaccctgtctcataagcaagtaagtaaatacataaataaattttacctagatattgattttttaacaaagaatcacaaatgagagatgttagatacaattcaaagaaacattaagtctttaaagttagtcttaatactcctcaaacataacacagccagtgcctgacatactattttttgggtttgaccctatcttacgaggatggtagtgtcatttgccacacagaatgacaaagcttctattgtattgaaaagctccttcacttattgttctattttgtttaagtgaaaaggtctaggttacaatctaggttaaaaaaaagagaaataatatttttttatttaaagtatctattcagagttctttagcttataatgtagttccatcaaacaataattaatcagcctaaatagtataggcaatgcacagctgtctttgttattttgtgttgacaaatatataccaagaatctataggtgaccctaactttccctgaaacattgacaaaataaattttttcatctagatgatcgtctatgatgaatgtgagaaaattcacttgaaattaaaatgccccatcctcaaattaaaacacacgtcattataaagcaagaaaagtccaacagaaaagccagtttcccatatttcttggtattcttcaggtccagttcctatttaagttgacctacctgctaatcagaactgatgtgttcagttctggcagacatcgcctgagttgtatgaaaatgtaccaaagcagaacaaactgttttgaacaaggaagactgattctttctttaagtgattttctcctaacagtatggcacttagttgtaaggaaaagggaataaaagtactatgtagcttatttcatattcctcccttgccttgtcttcttgatttcataaatggaaaaaagaatggagaagagaattggtagcctatacataagtcttttgatctcatgaattccatgtccaatttttgacacgtagaccacctgctttcttgttatacttgagccttacttctcattatttaatgtgaggctttgagcccaattttgataaaatattttagatcttctttaatacgcttgcttatatagaaacagatgacccttggggaaattcaactgataaaaatggtaaatatctttttgcttttctagatcaagaaaaataacaacactaaaacctcatactaatgatgtagttactttgcacatgaaacatcctagaaaaagttatttctactttctgaatgcacgtgttaagtggatgcttaagcccttagtctaatagggaagtttggcatagaacaaatttattttgaatcccaggaatatttaagtgcaagatataggggtaagaaaaaggagatagcacaaaggagaacttaaacaactctttcaatgggaagaggaattcattgctgaagatgtgacatctgagttgaaatggactttgaagtagggatgtggtttggccaagctgccaagaagggcaaagaaattgctggtagaagaaacattacatacaacacatgggagcatagagcagaagcaaaagtatgtattcagtgaattatgtgtggttctgtaaggctgtagagatatgcaggggctggatcacagagtatcttttagaatatacaaagaaaattggactttttgtctagactatgtgggatagggatggctaaatgtaaaagataggcttgcttctatttctgttttttaaagataactttggaagctgtgtgagttggcagtggtagaaagagggactagaaatattgaaactagttggaaagctgtatcatcagtaggctaagcaagagagaatgaggtcattgacctcaactgtgcaagaagagtgagttaatgtattagaaggtcctgacagattggagattgagatgaatatgtgcagatggattaggaattggggctgtttcctaaattcttgacttaactgaatggatggtaaagccatcacttaagaaagaggaagaatgacttaagtccatctccacagaaagagcctggattctgagtcctttgaaggcccatgtcttgatcatctttgtatttccagcaggagtaaagggcctgacaatgacagactctcaatgactcattaggaagcctaaaaggcaaatactttgttttactgattaattgataatgccaggtataaactatgatattgtaaaaggtgaagcaaaggaagtaaatatcccaaagactccaaaacatgcaattgagaaatttataatcaaaataggcaaaactagtaggcttactgaaaagcatattttgctttgtgtgttagatcagagcaggaggacagatgaatgcagaatattttgtagtatctccagagggaaataattatggcctaaactgagtggcaactctgctcatggagagaatgattaattcaaagaattatatggaagaggaaacggttagcagtttgcatttgaattgaaaaggagcttttgaggctgactgggaattctgtaagttattggcattgctgatggtaatgaaaagcttaagggagagtgtgacagggccttatcatgcatctttagttccttgatagggtataagtgagtcattctcctactgatgggatgattcctccttgctggacatattttacccagctttgagaaaggaactcattgcactgccatcttggaataatgagttaaagggttatgcattaacataagataaccactgagcactatcgctgccaggactggaatatattgatttgattaatccttaaatatcagaaggtaaaaactatcactttttccccccctcccctctttatttcctctgtctgtggcagacacagattagaactgagaaataaattagaaggactaactttggctttctgccacctagaaatagactaaatagtttaatatggatttatgtaatgagttcacaaattgattttgcagagtaagcttgctttaggaaataaacacctgtgtactatggtttgaatggcctacttctatgtgcactcatgttgataaaaatgaattttcttaaaaaaatctatcttatggtcacttcatcattccaatatttttgaaatccacaaatcaaaaaccaaacaatgatttagaatctctagatatcacctagggaaagcagtctctattgggtatcagtgataatgtcttatctttgagtgacaggattaaaaagaaaaaaaaaaagacctcctccactctctgtgaaacctccacttctccttttcccttgtttaagaacgtcacatgtgcctcatttaaacattaattatttagcttgaactgtacacagctaatgtgtaaaataaaatttcttgcaagtttgaagatgaatccagaggtaccgcttgtaagcaggcccccgctttttctatctcgggtggccaaattatgtgtaattgtaattggtgatggatggtgactgttgtgtcagccaatcattctaggaatggctactaagatttgtaattataatgtcccttattcctatttaaattaaacagtcttcacataactattctttcccttgaaacatggaaatttgggtgtgggaattggggacagttaagggtcagggttttacctcttaaaagctacacttttgcacagtctgtcccatttctctaaggcaccgtagatgggggaggccagcgatcaagaatggtaatttacaatctaagagtgcttaatctaaaatctgtccttgtcaaaggagaatgtgttggtccccatgcagcagtaatggaaattttatttcagcataagcttcaatgggggctttcactgtattctttaaactaccctcgtccttatcaatttatgccatgtacaggttttgtgggtttttaacatcattctactttaaaagagaaagcattaaatataataaataaatccacatttggaaacctataaactcaccttgcaagcataataacaaaaattgttatatggttatggctgaatctagctttattattaatcatttttcctggggattaaaacttaatttttcaaagagatccttttctctaacacactagtttctcttttagggtaacacttttataataaaaaattattttccttaattttcactgtcatatacaaagagcttttcctgttaagaaaatagatagttaagaaatataatactccagggcaaaaattggaccagattaattaaaataaatatatgaagactttataattgtttttgttcagtaacaaattagtaagtaccatgctaaatgaagacaatagcaatgacattatacattgtaaattagtaactatgggtattttgttttaaatctatttactagctcttgtttactaaaaacctctaagtatgtctctttcttatagtttccacgtggtatgtataaatctgttttattttccttcagaaaacacacatgctaactttattatatcttcttttctggcctgggattagttaactaggatttatatttatcttctatgttctacctcattaatatctatctcctatgttctacctccactccctcattcctagactccagtttgtgcctccttttgtggatcctgaaattctacatctcactgaattttatatatgcctaccactgtaacactggcccactttgttcttcatgctagattctactagagagcaattctaaggtcattttttttttacctttgctatttctcccacaaatttttccaagtcattattggccagaacaaacaaaaaaacaacataatcatcaaaacatctattattctctgctatctgtttcaatacaattttctgttcccaaagctcagattctttgtttttcgattgttccaaataggagtgacaattggtgtgctagagatggcatactgatgaccatgaatgagatatacatagaagattctatatattgttgccaaaagaaatgtgaggtatccaggtatccttgggaaagactcaattggctataagtaaaatttttgatgtctaaggcctcaggtatggcttggatgattagcaacatgaaagaacactggcaatattaaaagtgcacactgtatgttgtcagtttcccctacattttatacagctgtcaagaatactaaaagaatttgtgagacccctttttgttgactatttgttagattcatctaaggaacagttaacattctgaaaaatattactgagtcaaatgtcttcctgtaactgcaacattacttgcacattagtttttagaaagagtacattttaacactcttggctattcaaaataaatttcaagacctacaaatacaaaaaaaatatgatggcatactgctctttagagagcatcatgtgaaaaaatctagctctttgtttacatgtgcatagagacctgattaaaatttgggggttgtcatatcaaatttccttactatgtttccagatattcaaagttttggggataaaatgaacagctataaggaacaacaaaaataattgtttacagccttcttttgtagcagagacatgtgaatatcaaaggataaacatgaatgcggtggatttttactgtatcaacttagtcaaactgtaacaacctttctccgaatttccctctctttgtggttctgagttagtgtgggccagaaaaggcaaatagatgtaagggagtagtgtcttagtccactttctgttacttgtaacttgaaactgggtaatttatttttaaaaaggaattcaattcttacatttatggaggctgagaagtgcaacgtttaggagctggctctggtaaaggctttctttctggtgaaggctctttacagagtcccgaggtggctcagggcatcacatggcaaggaggctaagtgtgctagctcaggtgtttcttcctgttcttgcaaagccaccagccttactcctataataacccattaatccattaacctattattccattaatctataaatgagttaataaattgatgatggctctgtcctcatgacccaatcatctctcaaaggaccctcccttgcaaaactgccatattggagattaaacttcagcatgagttttggaggaaataaatattaaatacactgcaagtacctatacttttttattttttatttttgggaggtttgtgcaggatatgagttgctgctctctggtggctcacttgttgggacagggcaatacctcagccagttgctcctccaggccctgccagatcttctgtttcagcttttctaactggttcccagctttgaagacagagcaagggctcacaagccaagcactgtgggtggacagcctctttaagtaggaaaaggcaaggagatgaattcatctttagagcctgcaaaaaggaatacagctttgcctagaggacatgcgagacctctaacccaaagactatacaataacaaacatatgtaatttgaagacactgagtttgcagtgatttgttatagcagctgtaggaaacaaaatttgaattcaagattcttccactaattttgcatctacattctgatcattttggaaaattcttacagaaattggacaatgttgaacaaatagtgatttttaaaattatatctaggactatcattgccaagggactttgtcttgatatttcacaagaagaattttggaactatgaaaataggggatcccatagttcttactacaagcatagaatgcccaccaaacaatttaaagccaagcctattatccaggtacccagagaatccagcctccagaacagaaggaaacagtccccactgaaagaacacaaaagccaggaagccacaaggaattgccctcaggttctgaaggacaagagattgtgcattcaatagcttttgcaggaattaataagtgaaggccaagggttataataaacatctaaaggaagaatttagcacaaacaagaccacatagaagaagaaaaatgtatgcaagaaaaccagtatgaaccacacctagaaacctagtcagggattttttttttccatctaaaataattaaggatctttaccagttccttagcacagagaaatgtcaggaaccagtgccttgtcctcattattctttatgtgtaagaaactggagtaaacaatgccaaattattattccaatttgtaggttaaataagctccccaaatcacctagtcaccgtcttaaatttttaccttaaaaatcctacagggtattattataatggatttcctgaattgctgaaatattacttaatcaaagggagaagccattaaaacatagaacatgctatgttacagggctgacttctgtttacttgtgcacattttttttttaaataggaatataaagctaacttctcaggtgggaagatggtagaatcatcactgccatctccaaaactacacttttgtgatgctggcttgaacttagaccatacaaagttactcattttcagatgtttgtcaaaatgatcctccttcaaaaaaaattcagttattatggtctcagtaattgtgaaatgcaaacaagaatcatttaagaaggataatattgtatatttgtgtctagtgtaatccagacctctgtcatctcagcatttgttagagtattttctttacttcttcttcttcttcttcttcttcttcttcttcttcttcttcttcttcttcttcttccttttcttcttcttcttcttatactttaagttttagggtacatgtgcataatgtgcaggttaattacatatgtatacatgtgccatgctagtgcgctgcacccactaactcgtcatctagcattaggtatatctcccaatgctatccctcccccctccccccaccccacaacagtccccagagtgtggtattccccttcctgtgtccatgtgttcttattgttcagttcccacctatgagtgagaatatgtgatgtttggttttttgttcttgcaatagtttactgacaatgatgatttccaatttcatccatgtccctacaaaggacatgaactcatcattttttatgggggcatagtattccatggtgtatatgtgccacattttcttaatccagtctatcattgttggacatttgcgttggttccaagtctttgctgttgtgaatagtgccgcaataaacatacgtgtgcatgtgtctttatagcagcatgatttatagtcctttgggtatatacccagcaatgggatggctgggtcaaatggtatttctagtcctagatccatgaagaatcgccacactgacttccaccatggttgaactagtttacagtcccaccaacagtgtaaaagtgttcctatttctccacatcctctccagcacctgttgtttcctgactttttaatgattgccattctaactgctgtgagatggtatctcattgtggttttgatttgcatttctctgatggccagtgatggtgagcaccttttcatgtgttttttggctgcataaatgtcttcttttgagaagtgtctgttcatgtccttcgcccactttttgatggggttgtttgtttttttcttgtaaatttgtttgagttcattgtagattctggatattagccctttgtcagatgagtaggttgtgaaaattttctcccattttgtaggttgcctgtttactctgatggtagtttcttttgctgtgcagaagctcttgagtttagttagatcccatttgtcaattttggcttttgttgccattgtttttggtgttttagacatgaagtccttgcccatgcctatgtcctgaatggtaatgcctaggttttcttctagggtttttatggttttaggtctaacgtttaagtctttaatccatcttgaattaatttttatataaggtgtaaggaaggggttcagtttcagctttctacatatggctagccagttttcccagcaccatttattatatagggaatcctttccccattgcttgtttttctcaggtttgtcaaagatcagatagttgtagatatgcgacgttatttctgaggcctctgttctgttccattgatctatatctctgttttggtaccagtaccatgctgttttggttactgtagccttgtagtatagtttgtagtcaggtagcgtgatgcctccagctttgttcttttggcttaggattgacttagcgatgcgggctcttttttggttccatatgaactttaaagtagttttttccaattctgtgaagaaagtcattggtagcttgatgggcatggcattgaatctataaatttccttgggcagtatggccattttcacgatattgattcctcctacgcatgagcatggaatgttcttccatttgtttgtatcctctttgatttcgttgagcagtggtttgtagttctccttgaagaggtccttcacatcccttgtaagttgtattcctaggtatttcattccctttgaagcaattgtgaatgggagttcactcatgatttggctctctgtttgtctattattggtgtataagaatgcttgtgattttttcacattgagtttgtatcctgagactttgctgaagttgcttatcagcttaaggagatttggggctgagacaatggggttttctagatatacaatcatgtcgtctgcaaatagagacactaaaataagagcagaactgaaggaaatagagacacaaaaaacccttcaaaaattaatgaatccagtagctgtttttttgaaaggatcaacagaattgatagaccgctagcaagactaataaagaaaaaaagagagaagaatcaaatagacgcaataaaaaatggtagagtattttcttaaaccattgctacctggagtttctccataatgatgccctttttattcccagcaatgattttctattattttgtgttacatttaagttagctttcttattaacaaagttaatgatcatatagttctcattgtgaatattaaaaaagattagccagaaacgagcattaacccaaaacacttgattgataagtttgtgatacttgataatatgaatatgctctaataagtaactctatgcagttgtgtattacttaaaataaatatgaccagacattcttcatggtaatgtgactagcttagttattagttttataaatcaatgcaatgattgtactcacttttttgttgttgttgttgttgcttgttttgagacagagtctcgctctgcctcccaggctggagtgcagtggtgtgatctctgctcactgcaacctctgcctcctgagctcaagtgattctcctgcctcagcctaccaagcagctgggattacaggtgcctgccaccacacccggctaatttttgtaattttagtagagacagggtttcaccttgttggccaggctggctttgaattcctgacctcaaatgatcttcccacctcggcctcccaaaatgctgggattacaggtgtgagccactgcacccggccgtactcatgtatttttaagtaattttttcctctttcatgccttgtgtctacttctgcctcattgtctatggaaaaagaaggcatttatgcttttgcaggcctctttcttcatgaaaaagttactaattttataactgctttggaataaagatgaatgtaatccaggatggacttattttttcctcctaactaaaaaaaaaaccaaaaaacaaaaaacaaaaaacaaaaaacttaaaccttctttatgggcacctaaaagtactgtggcccttgacacagtgcctactgtgctgattggacaagtcatccctattatatagccatatcgtggttatactttaagaaaattgggcctaactttctaagtgctttgaagtcatgtgatgcataaagcagtgaattgtttcattatctcaattttcttatgatgtaataaattgtttttagtttaaaatcatttttatgtcacaggtatattgtataaggtgtcagttaattttttaatcaatagaattgttatttttcattaacttgtgttactgccacaaaggaattgaatattttataccaatttccagtacaaatagcatctaacatttaagctttgagaatctttggctctactttctccccactcccctcgctatttggcacactattttgtcctcaagttcatgttctgacacatacatgtgtgtctactagttgctaaaattttaggaaagttattttctaatgaaagtcattatccctaacttacttgcattgtcgcttggtatattaaaatgtcttttgtttcttaaaggaagaaatacaagaaaatgttcttaatagcaactgtatttctttaaaggcaaatagttatctacattaagtagcaaatacaactctaacagtccatgaggccagtacattctctcactttctgatagtgaaaaatatcttttctgggtgctagaggttgtctcaatactatgggctatgcagaaaaatgtggaagaactagcattttgaggggtgacataaagaatgtattggtggctcacgcctgtaattccagcactttgggaggccgaggcgggcggatcacgaggtcaggagattgagaccatcctggctaacaaggtgaaattccgtctctactaacgatacaaaaaaattagccaggtgtggtggcgggcacctgtggtcccagccactcggcaggctgagnnnnnnnnnnnnnnnnnnnnnnnnnnnnnnnnnnnnnnnnnnnnnnnnnnnnnnnnnnnnnnnnnnnnnnnnnnnnnnnnnnnnnnnnnnnnnnnnnnnnnnnnnnnnnnnnnnnnnnnnnnnnnnnnnnnnnnnnnnnnnnnnnnnnnnnnnnnnnnnnnnnnnnnnnnnnnnnnnnnnnnnnnnnnnnnnnnnnnnnnnnnnnnnnnnnnnnnnnnnnnnnnnnnnnnnnnnnnnnnnnnnnnnatttttcaaagttcaactagaatgtcttaggacgtaggacaatttgggggaagtatttccaccttaaaggaggaaatggtggtggcatggtctacagttattttatacccttgttctatagaagcatgtgtcctggggttcctgagtgtctccatactgttaacagctcctctggcaactacattgtaacagagtgtcaggagttggtgcagaattccagcatcagttccaaatgctgaaccagtaatcgatttcccaaggaaatcaatcccagcaaaagttgagccccaactctctatagcatgtgaataaaacagaaaacggctatcttagagaatacatggtaagctgaagaacgtaaattagacttccaataaatttgatgctttgtgtacttagaactcatataggcattatagatccaagcagtttcagctagcttttcatctctctcaaaccctgggcgaatgataaacatcaaagagaataacatgaaaagaaatatttactttgaccgttctaccaaatatatatatatataaatatatgaaaatatatatactaatatatataaatatatatgtaaattatatataaatatatatgtatatatacacacacacacgcacaattcaagcataataatatgctttagactgagtggcttatgcacaacataaatttatttctcatggttctggtgaccggctgagtttccctagtctgagattagggtgccagcatgatggttgggtttctggtgaggacccttttctgggctgcagactgatggcttcttgtatcctcgtacggtgcaaagagagagagataattccctgggatctcttttataagagcacaaattctatttataagggctccatcttcatgatctaataacctcccaaaagcctcacctcctaatatgatcactttggaggttaggatttcaacatctgaattttggggaatatgaatgttacgttcagtccattgcatacactgtacatatatctatctatctatctatctatctatctatctatctatctatcaatctatctatatatatatatctacataaatatgtctttaaatttgatatatttatctttaaaatattgaattctgaataccattggctagcaaaactatgggactgaaaataatctgctgatttctcatcttggcctttgagatcattaagaaccctgtgaactatctttatatgacaattatttttaattctaggaaattcaatacagtagtagaatgctatagaataacatgttcattttttgtgttcattttcgtcacataaattgacttcttaggcttcaaaatttggagagttttaatgttaatcctaacatcaaaggtaccttaaattttttaaatattatccattattagagtagctggtaggtttataaagaatttagtgtgctctgagatctgtatttttaacaagcaactcaggtgactcttaagcagatttgggaaccgaagtcgtaagcaagtgaactatgtaaatattgtaccctcttgtctttctttctattttgcctgtcactctctcctgcagagataataatgcataataaatttatagaggaatcaatgactagtctatggttagacatggactttataaagcaagcactccatcatttattaaagcatataaaatatatatcataacatatgttttaactttattgcaacaatccattttatgaataaaaatctcctaggtagatattttgacacagtcaagaaggaaactgaatctatgactgttctatgagcctgttagaattgatgaaattcaagatctaacatgcatgaaagcattttagatgtggagttagctgatattatttgggtggcttttctctcacatgtttattttgctattttgcttatagtcatcagtctacttgtccatctacccttgctgtaagaggtcttatttttccttccatataccaatccagtccccatcacagaccctgatgtatcatagaccccgaaacaacttgttaaggaaatgaatttctattcaaacatgtacacacacacacacaatctaggcgattttaatgctagcaactgaatcacaagaatggaataaaagatacattctatctctgatatgaacaactgcattactatttaaaaaaaaagtgggccaggtgtaatgacttatgcttataatcccagcactttgggaggccaaggcaggcagatcacaggcagatgacttgagaccaggagtttgaggccagcctggccaacatggtgaaaccccatctctactgaaaatataaaaattagctgggcgtgggggtgcatgcctgtaatcccagtgggtggctgaggcaggagaatcacttgaactctggaggcggaggttgcagtgagctaagatcacaccactgcactccagcctgggcgacagagcgagactctgtctcaaaaaactaatattaatataaaataaataataaaatgtgcttacatagacttaatattgatgataaaaattttgaataacacgttactattgcatagcacatcttattgctcgaaatgagacctaggtatatgacatttgtcaacatacatcaaaagattgttgatttgggaaaatgatcataaggctgataagttttctcagttcaatacatttgagctcatgacatgttttgaactctgaccccctaaaaaggaagcgttaggcatgctaatgggataaatcagccaaatcccatctatctgaccttattaatgtaactctaggatttagattctgaccttccataattattgacacctatttaatttatcttctcatcaatagtgaagcctagtgcagctgctatggcacatgtaaatacatcactgttgccagcacaggctgattggcattcatgcttgagtgtcttttttattttctccttggctgctgggagtagcctgagcagcgcagacactaaagagcttcatctattaggcatgacagatttgtattcagcgataaacgcctgaccttgctctactctctcatccattcccatcatcccctcgccagatgaaagagtctgcttaactcctgtttcctggctgtttccttggcaacaataactgagtcagtctgacagaataactaatagaataccttggtagtgagattaaagtgctttaaaaaaagtcgtcacccacagaattataaatgagaaatgtttaaaatcggaattttaagatgataccaatcagtgacattatgatttccttattaacccatttcattttgtggtaatatttacagacttttcccaaggtattttaggccgggaccagagtatttaagcttttaggatccatttgtgttatatgatgaaaacagattggttttgtaataaaacttgtattgctttagatgttgaattagtgggtagaagatatgtacagacagtgtcccaactgggaagaaggactttgtaatgaaatatgtactatctatttttctcattcctcttctgaaggagatgtacctttttaaggcattataactagaaggtcataaagctacaagtatcatctccctttaggattctgtcacttttagcccaattcttactatctgaaagattcatcagcattcttgtttcatattgttttttgacaacacatcacgaggttgtcaaaagtctcagaatccctgtggaattcttaaatttggactgcaaattatagcataagctgaaagctaaacttctgaatttttcagtgaaactttgatggaattttatagaataattttagattactttatatcttcataagaatgcatgaagctaatagatacaatatagagggatggagcagagagaccatttgggtaaagcattttctactctggatgtctccagtgattgcatcatgatttattagttttgccttgggctcaaataaattttaaatgatttctaaatatctattttttctattattctaattatatttttctaatctcatttaatattttctgaggccacctaatatttggatgtgcttaactgggtctaataaataatagaggacagaaataatgtaataacattaatttagataatctactctagaactctatattaaatgaaagcttatcatttatgattatgtcttgctattactacacattttgagagtgcaattaacttctattatcacaatgataattacagttggcaacagaagtcaacaaagcctatttatctgttttgcaattttaaaaatttagacatttccactcacatttagtacctctgattagaatggacattttctgctttgcagtctttttatagaggtttaatataaatttattccaattgttattgccagtgctcatttcaggaaacctgcttaaccacagaatgaagtctgaaggaggtgagcacatcaaaatgtagagatgactgttcaccagtcttcagatgactggatggtctgtttctgtccccatggatatcagaagaagcagttgtctttgctaatagatttgacagggaaaaatctttcaaatagtgtgtttgacttgctctaagaacatgaaacaaaactatattagcatccaattgctgctgtaacatattaccaataatttagtagcttaaaccaacataaatgtattattttaaattctaaaggctagaagtctaaattcagtctaaccagctaaagtgaaagcatcaatgaatttcttggctcatggccccttccttatattccttcaaactcctgctcctcctcctatcctgattcagaccctcctgaatcaactcataagacctttgttattgcattgagcttatttagataaaccaggataacctcctcattttaaaaatccttaatttatttatatccgtaatgtctttttttaccatgtaaattaacaatttctagggattgggatatggatatctttttttttttttttttggagggtatggggtttttttcatcctaccacaaaaacacttattcttctaaaatgtgtgcatacagagtaggcagtcggtaactattcctcaaaggtataaatgagcatgaatacacagaaatgtgcaagaaataatatggaaaaacaccagtggccaggcacagtggctgaaggctgtaatcccattgatttcagaggtcaggagttgggagacatgacaagaccctgagatatacctaatgctaaatgacaagttaatgggtgcagcacaccagcgtggcacatgtatacatatgtaactaaccagcacattatgcacatgtaccctaaaacttaaagtatagtaataataaataaataaataaattttaaaaaataattagccaggtatggtcctgcaagtctatagtcctagctactcaggagtctgaggcaggaagatcgcttgagcctgagggcccaaggttacagcgagctatgattgcacccctgcactttagcctagatgacagtgaggccttgtagctaaaaaagaataaaaaagaagagaaaattaacaagagcttgtaaaaataagaagtgtaactttcaataaatcatttaagagtaacctaacaactgcgtggtcagatctctagttgagtaaaatagagaaaaggggatgaaaagtagagtttgaatttgcagttgaatggttagttgtgctggcctctagattttgtttgtgtgattccatgggagactcaaaattaaggagtggagaagatataagctaagaaaaataaggcaattaaagacatcaaaataaatataatgaaggggctatgctttagattgaagtttatagcctcatagtgaattctagatcttctttagctttattctactagataccactagggagagagaagcaaaatagaaggaaaagaagcattaagcagagagtctaagcaattgtttaaaaatcagcttgcagtttgtgatatgataattattattatgatcctcgtctgtgatagcattaccataattactatgctaaaaatatcataactactttataatgaagtaaaatgtattaatatttagagtggtacattttacacaaaatacattctcaaagggtttacaaagctagataatgtagttaaaaatacacatcaaaagaaagaaagaagaaaggaagaaaagatgaaacaaaaagtggaggtggacttcactgtacttgaagataagtctttagggtgtgatattaaggttgaagggactaaaacctagtgagacaaaaagttgtattactgtgcccatgcaataataaattgcttaatacatttaattttctatccaactgattaatgagctaatgtagacaatcttttgttcacattcatatatcttctgtttttagttttctccatctttaaagcattgaaaggtgtaaattgagtcagttgttgttgatttatgaagaaatgggctgatcacttcccggttgcccttctatgtctgggacacctaggccattatcctgctaacactacatcctgttgccacctatatggtttttctctactaatcttaaaatatcataaaggcatttatttataaaattatgtgcctaacttctatatgctggacctgatgtcattttaaaataatatatgtcttgaagtagcttaaacttgattggggaagatagatgagtatagcaataaattagaccagattgaagcatacatatttgattttcatacatcttttaaggctcaaaacgtatctggtctttattataatgctgtactagtcagctagggcttccatcgaaaatagcatggactgggtaactttaacaacagacacttatttgctcacagttctggaggttagaagtccatgattaatatgcaggcaaattcatttactggtaagggctctcttcctcttctgcagaaggccaccttcttactgtgtcttcgcatgactttcttttgtttgcatactgaaacagagagagagagatttgatgtctcttcctcatgttataaggataccagtcttattggattagagtctcactgttgtgccctcacttaaccttaattacctccttaaaagccctgtctctaaatacagtcacattgggggttagagcttcaacgtatcaattttgaggctacacaactcagtcagctgaaggcatcagctgatgccttctcagattacatcagtaccctaaaatgcccctgttctctgacttcctacagagtacattgtctaaatttcacaactagaaattgattttagaattgttatttgaatattttgacttatatcatctcaaaattgttagctcagtgtagaatggtactatgtttcattttcagaatagagttttttttttaattctgaaacaattccaagcaatgaaaagttgcaagaatactacaaaagttgtaaaaatagtagaaagaattcttatgttctctttttacagagaccttactaagattttgccgattatcccaataatatccttgaaagtaaagggtaagatccaggatcattcattgtacatagttttcctattttctagtttctttcaatctgtaacactttttccatttttctttgaccttcatgaccttgagacttttgaagattacaagccagtcacttcatagaatgtccatcaacatgaatttatccagtgtttcgtgatgattagacctaagttatgcattttgagttgggctagcacagaactgatgctgttgttctcattgcatcacattgggtggcatatgacatcaatttgtcccatgattgatggtgataacttagacatttattaatatggttactgccagatttccctactttaaagttactttgcccccctttataatttgttttctggctgggaacagtgctcacacatgtaatccaatcactttgggaggctatggcatgagaattgtttgagcctagtagtttgagaccagcctcagtcacatacgggagaccccatccctacaaaacgtttttaaaaataagcccagctgtggtggtatgtgcctgtggtcccagctagtctggaggctgagacagagaggattgcttgagcccacgaattcaaggctgcagttagctgtgatggcgccatgctccagcctgtgtgacatagcaagacctcttctcaataataataataatagtaatagtaatttgtattctgtagagaggtattttgatgcagaataacggcctattcctcatgttccttttctccattagttttaatagccacttatgtttcttgcctaaatcagttattactagtaagttgccaaatggtaagtttcaactcctatagttccttccatttgtattggtttgtctcctgaaagaagaacattttcttccccctatgtatttatttattcatttatattcatgtggactcatgatctttattttattcaatgggttattacctgttattatcattccttattttgatattcgaattgtcccagattcaagcagtaggagtccttctagcttcctactatgccctttgacatgttttaattacattataatctgaatctttcctgaaatactttacccacaaagctctaaatgatgcaagcacatggagatccccagaatatagtttcaattctgccgttgctagtttcttcctagctgtgcagtttcaacaagtaaaacctgagccttaatttcctattctgtgaaatggaatgggaattaacttgcccagttctttaataataataatagctaatatttgttgagcactatatatttgtcctctaatgattgacaacaggtagggattaatctgtttttatctgaataactagtaagttcctaaaggaggtttgaaccccaaaaaaggggcttcagggtcatagcaagaagataataaaggtaaattctattactattacatgttatttatattgtaatgagagttgttctaaataagagttgtcaacattgttgccttggagtctgaactagcagaggattcacctaatttcagctagaagttagaggtatatgagtttcactcacttaagagacttttcttttcttttctttctttctttttttttttttttttgtttgagacagagtcttgctttgttgcacaggctggagtgcagtggcacaatcttagctcactgcaacctccacctcccaggttccagcaattctcctgcatcagcctcccaagtagctgggattataggcaggcaccaccacgcctggttaatttttgtattattagtagagacaggggttttgccatgttgagcaggctggtctgcaactcctgacctcaagtgatccacctacctcagactcccaaactgctgggattacagtgtgagccactgtgcccagccacttaggagactttccatttcccttatacccttagcatgaaatgagaaaagagtaaggggagtttttgtgatttactctgagtatcaggagagacatatataaatttacttgttctaagataatagttctaattaaagaagaatttttagcaacctcttagtttcaaacactataatgttcacagcaaataaatagaaaggagaaagaaactgtttcagtgttgaagtaaagtcagagaaaagagagagacagaaaaaggagaacgaggacaataggtacaagggagggagggaaagaagaaagggaagaaagggagtagagtcagagaaaagaaagatagaagaagcaggacaaaagggacaaaggaagggaggtggggaagaaaggagaaagggaagaaagaaagggaaagccggagggagggagagaaagaaacaccgagctacctgtgtagcagaggtctcggggatcggatgtctagttgtgctggtcccatctcttgataagccctgagcactcatatatcttgtgtagtaaataacctaattctaatagcttccaaggaaagcttgcaaaaaaaatggccagaggaatggagagagcctgttttaagatagagagagggctaccatccttgcatgtggcatctgaaagataaccacacagagcatattttggagattcaatttttatgtaatgggtgtcgttactatccagaccatggggaggaagacatgcaccctttaatcctgtagcaccttcaccttcatcttgttccacacaattaacatttatttggatggctgtcttttttgctttcctaataacagtgtaattttactttacatgtgagatatagcataacaaatcgaataggaaataattataatcatgaaatactctcacagaggcatctccttccagctagttccaggtggcccaaggtcgattgtgaacactcaggatggatggcgtgtctgtcctttctctggaggtgtcttgggcacacagacctatatgtgcacttggcattgtgcttgttcacaatgttaaagttgtgacgttagcaagtcagagatgagtaggggcctgcagaaagagctagttagattaatccttaaggagtgagccatgaaatatttcatgggctgaaatgagaggcatgaccagtactaaatcagcagaccttgggaccctttaacagcggtgctaacccaaaatatttttaggcctgaaaaaaatgggcaaagtgatctttacataaattattctctgggctgctagtcacacaccagcatgctgggaacaataagctcacaggggtatttgttcaaaatatttgatttcccataaggctacttagccaagaaaacgtagaggacaatttacttttcactgacatgtttgttgtcctttcttctacagccattctcccaggatgaggataaaatatggagtcttgattctgagacacagtttgtctttactagagatgccatcaaggttctggtgattccctaggacaagtggcagtgcttcctgactaccactgggctgtgtgtgtgtgtgtgtgtgtgtatgtgtgtgtgtgtgcgtgtgagtgttgacattgatttctctcctcttggcatgtagaagtcccaagtgccccactgacccattacctgagcctgtaattacttcaggagtagggaatgaaaagggcatatctcctctgctttcagggaatgacagactcgggaaaataagcaggccctgcattaaggcaaatctctcaggagagcttaaagactcaagtcttgactcggatgcatttttacatcagtagaggccatgctcattaccagtgaagactgctgaagttgtggagttggcatatgaccctgaaactgcttcaccataaagacagattttaatgcccatatgtgacatgcaggcacaaaaatgtaatcgctataattagccagcatccctttttcatagtgctactatttcgtgactacttgcctacttcattttgttaaagataaaatgttcgtcctatttttaaaaagtaagttgtttcttcacaagccatttttagggatacattcatttttaaaggtattttatagggagataagtgatcattccgtgtgtttttattcttttgattgtctaggatctagattttgcaattttgtgaatctgtttccaaactctgcaagggtgtctatattataagttatataaaagccctctgcctaattttttgatgtatatgtatttccagcctaatatccaagctgtattgatgtgggtgagtgagcattgctccctcagacagtctgcttagctgatttttgaagttaattatggtgcagtgaaatctaaaggtcagaccacatctattttcctggtttgttcaatgctatgggcatacgggcaccagataaatcccttaactgctgacctaactaataactttcctgtacactttaacctatttcctgttccaggttttcagactctttattgtgctgtagggtcttcttcagaatgggttattacagagcacatcacccaaaggctaccatgaagacccccttaggaatttcaaatcataatgtgtaaggtagcctttctgcaatacacccccaagttatcagtgtatttcaccgattgcctggattatttcattttatccttgccacttaaggagaaaattaaatttcagagagaattttgaaaaacatgaaatgcttagggttagttgctaagggatggttagctcacagttttgaaaattgtcttgttatttatacgttcatacatttaccccattcatttatgaattcattcattcagtgatttcttattgagcactaccctaggatatatcaccatgcaaaattccgtggtatacaaaaactcaagaatcatagaacctgacataattacatgatcataacacgaactacaaatccaggcccagcttctatcagtgagagacagaaccagggtacatactctgtgcagtgcatggtagcagaaacttgaggaggttcaaaagaataggggaacacaaagcaatgggaacccagggtagtaactaaagcagcatgttttgtatttgtttagggtgtttttaattttaagttttatttttttcttgaagcctatgctggagttcagtggcatgatcatgactcagtgcagccttgacacttgagcctgggctcaagtgatcccttttgcctcagcttccaagtagctagaacttatggtgccttctttaaaataactcataatgttcatccatgattaaaataatgtgctatgactctcaatgaaaatttaaagccaatagttgtcatttgtatttgcttatctaatcctaaatcagctgtccccagaacacttctgttgtactttcatgaaacgcttgatccttttaggattattgttcctctaatttaaagttctatttcttaatattcttagaacagtattaaatttattaagacattaggttctgaatggattcttctgccacagtttgaatctaaatattctcagtaggaaaaggttaagcatgtgagtgtccttattcattatttgcctttatattaactggaccaatacatgggggtttagaagaagaatctagaaacacagctggactagggagaggtgagtgaggcactttcttggggtatacaatttaaggggattccaaagcactctgtaatcaagataatattttaacacaataatttttaaaaattaaaattaatgctaaaatgccaaaattcacaaacaacataccaaaatcttaaattcagacagaattggtaatactgattttcctcttgctgcaggcttcagtgtggtgcagcatggcagtgatctagaacagatggctcttgcattctataacagttatagagctttaactctgggctacatcatttctcagaatcttttaagacctagtgatatggtttggctctgcgtccccacccaaatcttgtcctgaatactcacgtgttgtgggagggagcctgtaggagtggaagataattgaatcatggggcaggtcttttctgtgctgttctcttgagagtgaataagtctcacaagatctgatggttttaaaaatgggagtttccctgcacaagctctctctctttgcctactgccatccatgtaagatgtgacttgctcctccttgccttccaccatgattgggaggcctccccagccatgtggaactgtaagtccattaaaacttcttcttcttcttctcagtctcaggtttgtctttatcacagtgtgaaaatggacaaatacacctagctatttgattttctggtaattcaaaaaaaatgcaattgtttatcactggaacagttttacaaataggcaatgagcttgagtatgtctggattatctttaaaggtcaaactatagccaggaaattaatatggattaattaaccaatgagtaagctgcagagtttggccttgaactttcccttctgacttctggttcagtgatcttgttaagtcatcatactacttgggtcccgaatgctcaagaggtagaagtaggttatttatcatttagatctcctgtctgtgcagtctcctagagaggttctatgcaaattcaatttcacccttaacacaaaatgaatacaccacatgggagcagacagagaagaaaagtaagttaattcccatctgtgattatgtaaatgcattctagttttcatgcatgcatttaatgggttggcaatcataattttaatactactggaaatggtactatttggagatttgtaaattaaatgtgttcatgtattaattggcatccttagatttctagatcttggaaaaacagggtgagaagatgctgtgactaaaaggttctatgcatggaagaaatgtgttctttctggtgctatttcttgacacagaatttccttagcaggcagtttagatttccttaataaagaaagccaagcatcttcttgggatacctgaataatattctgaaagtggcagactactcttgttggcaactgaaaatgtacaagggccacaagggctgttagattcaagcccatttatttcccgagcttatctgtctcggaaagatcttagtcacagagtgtttagccccaaatttacaaacattgtttttctctcatggcccttgctttataatggggctctagtacaaggaaatgatgtgtatttttatttatttgtatcttgttaagtaatcagatttcagactacacaagtaggatctaacacaaaagagttaaatacatgtatttgcagaacacaaattgtttttgaaaggattgtgattttattcatacactggcttcattaacaccatgacgagctgttcacattataagctaagttacctgatttcatttatgctttgctgtcccctcccacgtgcatatcccatttttagaaggtgctttctgtgcctgggaagtagaatgcattttttgcagcgaataggttattttcttatcagtctctgacaatttgtagtctcataccctcactttctgccatcatgcctgcctggaagaatcattctagtgtgaccaacttttgaatgtcctctttagtatatttgtgagtgatgcctgaggcattttgtctgttcgccttctttcacacctccctgtgacccaagatgagagagtaatctgacaagcagaggcggcaggctgtttgaaaccctagcttggctttactcgatctctgtcattttgtattttatttgactgtggcagtttcatgggtatatcagagccccccagttatcagttaggggaagctaataaaatccctgacacatcagattgttttctctttctttctattgaactctttggcaattgggcttgatgggttaagactcaaaggaggcgtcttatttcccattgctgcctaacctagattcttagctaaggacagctagcttcttagcacattttgccatctgccaaatgcagagtggaatgtcctgttcccagctttctgccatgtgcttggttcttgctcgcatttgggactcatttgcttacttgcctgcctggtactgggaaggtatatatggtgcttccttgcaagctgaaactctgggcatgttattctctccaggtccagaattcacgtttcttcaactcaagaacctgttcagcgggtgctgacttggatgtgtgtgttatggcttggccacatggtactcaagatgtaataagaggagataattcactctgagacttctaattaaggttcaacaattgaagatctaacaacagattttaagtcctcattttgttactggaaagggatcctgatctagaccccaagagagggttgttggatctagaacaataaagaactcaggaaaagtccacagagtaaagtgaaagcaagtttattgagaatgtaaaggaataaaagaatgactatgccatagacataggggagtgtttccaaaagcatgagaaagaatgtgcccaccttaggcacaatacttgtttcaatataaggtaacaaaagcaaaaaatcatggggtagatgtgctctactacaagaatgcctgataaaagattgttaatcttcgtgtaattactgttttccacaagaatctgtattattatctttttaaagcgaaacttattcttaaaataggaatgcttttgttcttaagacatagggacatcaggacatttcatgaatctgttaagtcctgggtctggtaaattctggatctgtttggtaaacattattaacgtgttttcttaaccataaacatcctctaagaatgcctaacttcctgagaatgcagcccagtagatctcagcctcattttacccagcccctattcaagatggagtcactctggctccaacgcctctgacaatttaaatgtagaagaaaaagtctaagattgagtagagatcaaagttgtgtcaagaacagaaggaaacagtgagacatgttgcagaataaccacaaagagtcattttacctactgcatgtcttatgtgatagaagtagatccttctattacccttctactgtcttttatgttcttaaattgggcccatttttctggcctttcaaaagagaatttctgtttgacagtgaactctaaattgaaaaactttaaatgactatcctatagaagagaattgtgtctgatgctctcttacgtttataatctttacttcaaactttgatccaaaaaaaaaaaaaaggaaggaaaaaaaaaaaaagaggaagacgtggttcctaacctcaaacagcttatactaaagtttgtttttctccctcaatcagaacttagaaagagtctccagggagatgacctgattaagaaattaaactgttcataggtgaccatgtgttacttaccacagatagcatattcatatttaaagagaggctttctgcctcgtgatgctgtaaagttttaaatggtggtttctgtttgccatcgtataatagctagacttagaggacaataatctaggtgagagtaagggctatgattttcctgtgctttatttaagctcaaaatacatttacttatccattgttttctattacgttttatttctgggttttatcttttttccttgtttgtttatatttatctcactgttctctttcacttcttttttctctttactaccctcaaatagataatcactggaagagcaatgcatccgagaaaaataaattaactttaatccaagagtaaaactcaacgtatttttcagaaatttagaaactgccagtttatatcagtggctttttgtgtgtttgctttcttttatatattttctattatgaaacataagacttatatggaagaatgcacgtaaagacatacacagaaaaacacacacacacacaatggaggcagctccatcaattctcacttaattcctttgagtcaagaaacagaacattgacagctcccaaagaaactccttcaagacctttctaattgcttgcctatgtttcacaccaaaggaagacactgtcctgaattgtattgaaacttctttctaagtgatatatggtctaggaagaatgtatccacacatttctacagctacttagtaccaatagattttgtgaaaggattagttataaataatcaatgttgattttgttagtataatgtaatttaattattttctagtttgaacttttaaaatcctatttgttgtcatatattacaaattttgcgtatgtacataaaaataaatttctttgatagattgaaaagaaaaaccaaaaaacttgtttctaacttttatgagagttgtacttcccaagcacccatccagaaacactctaattcagtagttgttgaattatatatgaatggaatcccaccatgtatattattttgtgtctagcctttttttctgggcattcttttgggagagtcgtccatgttgcatagctatagtttgctcaatgaattgctattgagtgtttcatggtatcagtataccataatttacttatgcgttctaccaatgatgggtgtttggattgtatctgatttgtggctgttttgctagaatgaacatgcttggacatggctttcctatgcagcaagcacatgcctttctgttggtgtacatctaagtgtggaactgcacattttcaaactcattagataatgtccatctagttgccaaagtggttatatcaatttatattttcacctagtacttataagagttgcaattactctatattctcataaacactgtcattttaattttagccattttatgggcaggtatagaatctcattgtagctttaatatgtacttccctgatgactaatgagggtagtcagctttttgtatatttgttgaccgtttgggtgtcttttgtgaaatgcctactcaggtctcttgtctatttttagattgataggttttccatgtgtattgaatctactgatcagtttatagagacagtacaattttaatagtattttaatattttataatatttaataattcaatcttccaatactggatatctggtatggtgattctttgcaattttgactaagtgttctaaaacttcaatatttattaaatcctctttattattttttaaaaatattttatagttttctgtgtgcaagccttgccaatcttgtattagatttatgttagaatttctggtctctgtctctgtgtgtgtgtgtctgtccgtctctgtctttctctttctttctcctcttccttcattccttccctccctccctccctccctccttccttccttccttctttccttctttccttagctggttcttccagtagagcagtggttcttaaccccaggcaattttcgtctgctgggaagatttggtaatgagaagacatttttgactgtcattaactgagaaaacactgctgatatctagtaagtagaggccagagatgcctttaaaaacttatttttaaatgttgtccttttttttccttccagtagttctcaatggaaaggtggttctgagttttctggtctaccattacaggaagcagaattcttgttttatttgtctgtgcatttgttaatttatttctaggtaggaatctaagaaaatcagcattgaaaactctgaaagtattttttttttctgggaaatagtgcatattcaactgtaaactattgaaaatgatgacgtatttaacaagatatgctcatttcatagaagtcctaatttgaatgaaaaccattttttctttaatttctataatcatagcttgaagaatgtctaactcatacttatgcagaagagatgtccacttgctctcactatccctgagttagaaacgaaatatttaaatgattaaaaagtaattctggaataaagtgagatgacttgttgctcctcagtttttcagctgaataaacacagcttcataaattgtgacattaatatcatcaatagttaaatgtgttgacagataggcaaagcctgtagttggcatttctctcttctcagtgttatgtgggtatattaaacgactgttccatatcatagaagtagattggaggttaagcaaaataagataatttagcaatcagcaagttttaaatttttaagaacatccaaacccaaccaagaaaacaaaagagggcttttgccactttggtctaagtttaagagtaagatctaaatccagcagagacgtctaagtctaaagagaccaccaacttaaatttacaagaaaaaaacaaacaaccctatcaaaaattgggcgaaggacatgaacagacacttctcaaaagaagacatttatgcagccaaaaaacacatgaaaaaatgctcaccatcactggccatcagagaaatgcaaatcaaaaccacaatgagataccatctcacaccagttagaatggcaatcattaaaaagtcaggaaacaacaggtgctggagaggatgtggagaaataggaacacttttacactgttggtgggactgtaaactagttcaaccattgtggaagtcagtgtggcgattcctcagggatctagaactagaaataccatttgacccagccatcccattactgggtatatacccaaaggactataaatcatgctgctataaagacacatgcacacgtatgtttattgtggcactattcacaatagcaaagacttggaaccaacccaaatgtccaacaatgatagactggattaagaaaatgtggcacatatacaccatggaatactatgcagccataaaaaatgatgagttcatgtcctttgtagggacatggatgaaattggaaatcatcattgtcagtaagctatcgcaaggacaaaaaaccaaacatcgcatgttctcgctcataggtaggaattgaacaatgagaacacatggacacaggaaggggaacatcacactctggggactgttgtggggtggggggaggggggagggatagcattaggagatatacctaatgctaaatgacaagttactgggtgtagcacaccaacatggcacatgtatacatatgtaactaacctgcacattgtgcacatgtaccctaaaacttaaagtataataataataaaataaaataaaaaaagacaaaaaaaaagaaagattaaaaaaaaaaaagagagaccaccaactttgggtttgaattctctttcctgcttgttagttgcagcagctcagaaaaatgtccactctgatatccctgcttccctcataaacaaggatttttacaattttaggttatcagtctgcctttcaacaatacaaagacttgtttaaattgctttaaaagaggaagaaaaaaaattatctcatcatgtttagatcctcagtcttgattctgagcatttatgctaatgggatacatatatgtccatcttgtacattttccctggaaacctccaatcctgttggaattaattgaataactgcatatgcaatagaacctctaagtataatgaatctgaaaagaaatgagaacttggagattcagccaagcacaagtcatgttagatattttagttgttttgcaatttgcagtttcaattgctgaaaattctcttgaatgcttcattgtctcactgatctaccaggaaatgagagttgtgttaagagggaaaaaaagagaagaaaacacccatttcatcgtggcctgaatgttgatctgagtggatactggagactgttttcacgattgcttttgagctgcattgagtgactctaggcatgcatttagaagccactacaggggtaaaaaaaaacaaatcaaaaccaaaaagccttctaaataagtaaaatcttgtcttatatttaggagatgttataccaaaaatgaatttaatgcattttaggacataaaaacaccgctaacattgaatgaagaaaaatacttagcctttatattaatagcccatttttctatagcagtctcttcttataatactaaaaaaaaagtcaataactatgaaaattaagtgaatatatactctgctaagtactttttattcactttataccccataaaatcctcacaacactatcatgagaaaggttctattgtacagttgacacaaataaatagaatttaaagtggtgaagaaactcgccactcactcatataataaatggcagcttctggatttgaacccagatctgcctttattaagtgcagtgctgctgcattgagtgtgggtgactttacagtgatcaaattatgggtgtatgaataatgtaatggatttatgagagtaatccataagctataacatttcagctgccctcagataagctgtatgtaaggagcttgagacatgttttttagactcttaaagggcctccttaaaaggatgggaagaaaatctattttacttcccaccatagattccatattggcaggattcttggggtagaattggatattattcacactcaaaagatcactgggcagtgaaacataataaggccacagaatatggtgaagtactctgtactaccttgaaacatttttagctttcagcatccaattgtgtaattgcaatgtgtgttgtcattagtacttataagcctttttgcttaattttaaaattggaattaaaatactgacttacattttgaaaattccctaaaaacatcatcctctttcctttggattcttgctcatgactgattcatagaatcaataatatgcagggccagtattgtgagagattttcttttaaatgagtttctagggctccagtgattcaaaaaatcccattaaagtatattttaaaaattaaactgaatccaccaaataacacatccatgaatgcttatttgaaaacaatgtaaaagagaaggttaaagaagttgatgtatattttattgtttttaaaatatttatatgggatgaaaattcagtgaatcagaatcttttattcagaggctgctcggtaaataaactatagaacacgtaagatttatttttatgtagttggatataatttattaattcgatttcaatacagtgagagacttagagtgatttaatgattgacatgataatttataagacttatatttaccctcattcgtgtcccttctggaaatctcataatcttacctgtatatattgattttcattagttcagatatttttcctttaaaaaaacagattctatttttctttatttgcttttatttgtttactttggcttttttggtaacagctttattaagatataattcatatagtataaatcctattattctttagtcacatggaaataaaagttgaccttataccagatcaacaggtattgtaattagaaaagtttagaatgtagattactttcagaattattaaagcaaaagcttttatttttgtcaaaaacctgctttttttttaagaaatagtatatgcatttcttgtcttaacaaactaatggtaaatcccaggtgttaaacggactcaatcccattaaatagccatattttctttcatttttaactgataaatttcagaaccatactgcttcactttctgtcattttattatgtaatcttaactaagccttgccaatgatgttttaattatacctttactatattagagtcatatttgttctattgctctaaatttctgaattttctgaagctttcattctctctaaatttcaagcagaattttacagttctgaagatttaaattgtgaacatgaagatagactataaattactgattgaaaaaagacaagtcaaatagccctctggaaattggtatcccatagccctttgcaatcgtaacttgtgcataatgcactcatgtttatgtaaatgacatcctaccaaacagtcatttataataccagttagcatttgtattgaatcctggcagtgctttatttctaaattgtacccatttttaatgaacaccccccccaccccaagtaatgtcttaaaaagtaatgtcaggtgcaaattatttttaaatagttaggttttgtttctgtataagatatttaactttgaaaagaaaagtgacagcctgccaagtgcataatgcactctcctgagtatcagtacttgcatattttaagagaaatcacataaaaaagtaatagagtatctcagtataaagcaaactcaaaaagtgtttttctttcatgttagcttcagcatattttaaaatctggtgggccattgagaaaacagttgcgatgttatttttaaaatgtggaagccacaatttttttttaaatcaggcatgttgtgtagtgtacataccaagcccatgagcccacaaaaaggaacagaaaaatatattctctttgcaaagtagagtggtgggttattgacatgcagatcagccacgttggactgaattgctcctacacagaataactgaggacttcaaatcactttgaaaagaccaggccagggctatagatttctgtgggccctggctccttgattacatttatggttggattcacaaatttataaaaataagccagttcgtttatttggggacaaatggaatacagatgaagaaatttttatacacttgatgaaagaaatgtgtccaagtgcaattattattttgaacgttgaaagcaaggcccactgccatcaatgctaacacatgaactgttgcattctctgcgttgaaagctaagcccttgtttgaaatgaactcttaaggtttttccctttcttcaagaaggccttccaattttcaggtttttctccttaaaaaaatacttaatatttattagctaaccaatgatttggagaaaatagacttttcaagaggaaagggaaaaaatcacactcatggattattggtggtaatttgttgtatggcatagcagttcactggttgtatgccaatgatggttttctgaggtgtgggagatgaactaaaatctttcttaacagaaagagaattagcattacaagaaatacacacaaaataaaagacatttccatgatgatatctaatatattttcatggagacttgagtatctatgtcatctttgaaaattagttttgcttgttttacctagcatattaaagttggggtgtgtgtgtgtgtggttagtggcagatacgggtgggggcagggtagtatagaaactagtagtgacttaattgaatgaaatgactagaagatagctttctaaatcccatttcaaaactggaccatccaatttcactcttagatttgattcccccatcccagtgctagaattcggccagtagttgtaaaaaatacaagcactgtggtggttgcattttcttaatgaaggtaacatttgagttaccaaacagtttacctaactgttttgtacataaaagtaagagatattcttttatgataaaaatctattttaggattctcattcatttaatgtgtacatttagttatttggcattaaaagtaaactcaacttgaacaaaaatttttttgtatttgctaaaagataattatgagatgttttaatgggaagattaaaaattttctttaagacgaatatttttcttactatactgtattctgtggcaactttatgattttttttaccaataatctcgagaatatatgcaatggaccaggaacaaatccttacccaggatgtgggagcggggttgaggggggtgctgtggggaatggttcaaagtagattagataaatttatgggtctgccaaatcctcataatgggttgaacgatcgtgacacacaatgttacattttgctgacctgttacttagtaaaatgtcaaaatggagccagatttgcaacacatgatgttaatggtggagagtgtccaggttcttggccacttgaacaaagaattggacaaaacgcacaaacaaagcaagaaaggcacaaagggatttcttgaaaatgaaagtacactccacagtgtgggagctagcccgagcataggagctcaaaaagctccgttacagaatttttgggagtttaaataccccctagaggattccattgtttatttgggatacgccttatgtaaatggagaggaagaagtaaagtgacaaagtcatctagttggcctgcgccctatggagaggatatttcctgtcatagctgaatcagccttatgttccgtgtctccagaccctgttttcctgcttcaatggaatgacttcaactttagttacatggttttgttttcctgatgtttgcaaagttacctctgtcttaactaggataggttcatctttttttgatttgttacacagttgcagctattcattattgcatctttcaaataaacatgaaagtactcttgggtttcagatcaggaattattaaaaatgatttgtagcaaaggaggttgctttaaatccagttcaatatcatacacttcttctacttcattctttgtaaaaattaatctttctaaagttttccttcgatttcaattgaatatttctcaccttttcttgatatataatatatattgctaaccttttaaaaaacagtacacatttatctcacccatttccctaattcctatgtctagactaaagggcagatcctccatattaagttagttttgaaaaagtaaaataaatttattttctcttgtgaccaaaatagtttagattttcaaccagcccatcaagtgaactttcaaataaccaaattcacattgaactattttttagatggaaagttataatcaatgaaaatccagtaaaatgcatatataagtctttcaaatgtcaaaagagaatacctgaactaagctttggaatactaagcatttaaaacattctccattgaaggcatccatcctttattaaaatttgcttatgtgagatcatttaatccatttctacattgggagttattttggctggattgcattggtcaatattacctttataatactgcactgtaagaaagtttacttgctccgtatgaaatttccaatatttgatggtttttgacctacaaaagcagcaagtttcacttgcttcaaactaaaactgcttttcttaagctcctttgaggattaaaggagaataggacagaaggaagcttcagaatccagaccaaattttactactcatcctccaccctttcttttgtcatcttctcccaaacttttatttgcttccaatctttgtgttgctgaatgtttggggctctttagttgttgaatttgtattgctgtttcaaaatcaatggttttccatctgctgcttatatgcagacaactatgagagaatcatggaacctttgcactaaacctgaagattgaattaagggcattcagatttaaccgctttttcaattaaaaaattcctctacagcagaggtcagcaaacttttttttgtaaagaccaggaagtaaatatttcaggctttgcaggccacgtgatctctgttgcacctcctggactctacagttttcaggcaaatgcagccacagaaatcatgtaaatatatagacatgcctgtgttccaataaaacattatttatggacactgaaatttgaatttcacattcttgtcacgtcatgaactgttcttcttcctttgatttttcccccattcatttaaaaatgtaaacattcttcttgtcttatgggccacacaaaacaggcagccagatggatttggtcttcaggtcatctttaccagcctctacgtcacagcatcactgacatgggtcatctgacgtcatcataaacacctctgttgatggggagttgattacacacaagtcagcaaattcccaatgcttcatttgcatttatcagaaatgtagtagaaccatattatgtgtgttattttttatcaaacaaaagacaaagaaggcccccaataatatttttgcagtgacatgattattattacttttttctaaaccagctcttataggcaatattatcttccaaaccactgtgtataattttcgattatctgcactgcaattgtaatatatattttgactactaccttcgtcaaataatactgcatcatagtgtttcgtatataaagcatgtagttttataactagaatttcagatgtcacgcataaagaaacctcatttgagtgattattccatgtcattcttggcttttacgaaattttagacatgtaggttgctttcacttgtttcactgacgattgcccttgtgcatattgttaaatttccaacacttatattcattcctttgggaagaattccagaagtggaattactaattctgagtatataatcatcataatctttgttgaatttactaaaatattatggtccctgtataagtggggacaatatacattaagtcctttatgtgggacaggcaatgcgctaaacactttaaatacattattacatcgaaaccccacaatagttatgtaaaaatataggtcattatccctgcttgtagaggtagaaacatgactgacattaacagttcaaattagaacttaggtctatctgactccaaagcctgtcgggaggcattttatcacctcttaccatttataaatttgcaatgctaatacacccgtaaggtagaatgctactttaattttttttccttctctctctttatcaggtgaaattcaacttaagttttaagtcttattttaacattaaatctgccacaaattattcctcaaacccaacaaggcagaatctactggtcattcctctgtgctcccacctattagaagtaaaggcttattccagtgtattatttttagcatcttgaggaaggtactgtggtacatttatgctgtgtccccctgaggtatcacaaagctttgtacaaagtcagagaccaatgcatgtccacccagtattactacagtgggtcaagatctgcttctggaagcttcgtttcattggcgtacattctttatctctgctataagtccagtaaatcaaatactttggtcttgtccttattttatcatctttgttctcttttctggtatttatctcacctctcaccaccctactgccctgaaaatatcatttttgtgtacttagcctccctcagaatgtgttcctggctcaactctctcaccagcagatagcatgaggctgaccaaggcctccatcctcacatattagactctgtctacttaggaaaactagagactgaaaatgagatcagggccactcttgtagaaattagaaaccttagcaaaccacaaatggcacagattttaactggcagattatttcttattaaaacattttaaaatagttctagttgtaagttgactcagatctggaaaggtatgtgataaagctattttcattgggggttctaagtctaaacatgtggctctgtggagaattaatctgctctgctgtcattgtcttagcatcattatcatcatgattatcacattgttgtagtttccagtcacctcttaggcactaattgaacagtaaggttgcatcaccgctgttggtgctgcttaggtagtattttcacctctttacacattgtggatcattttcttactgactttctctggcctctatattctacacatcttggataggatgtgatttgtaaaaaggaatatacaaattatgcccccaaaatgtagaaatttaacaatctgatgttatataaaaactgttgataattcaactttgtcctagaaaaattatattcaagttatagtctcattaccctgaaattttttattgagttttgtcataaatataaacagtgtacaagtcatggtatatatccagctgtatttcaaccatgaatatgttcttcaaattctagaaatctctatgcgtaaatatcaataatttttatatgaggtgtttattacaattctgaaattaaaatatattgtgtctgaaacttcatggtttgttaatcatgtatgtattatgtggggaagatatttgtataaaatactattcatttgcttcaattagtatagaataaaaacatttatagaattgcgttttaaatttagaatataaccttagagaatgttatttttatttggcataggtttttttcatatattagacaatttgtaattggataagacaatcttcagttgaataaaatactatagctgtattctttaccacatataggaatcaactcttacttaataacaggaagctgtatgtttgctaatgagaagattacataatgcaatttaagtttatgttctgcttacctttatgctgaacaaaactgtttgaatttacaaaaaaatcagaggaaaaattgctctgctaataagcccagtaaagatgatgaataatgaatgttggaatgttattatagaataaagccacaagctatgatatatcttgctgctaaattattttaaatgctgtctgataattatatacttgttttaagtctacatctgtacatgttaaaattgaaatcagagtttctaatcaatactaatttttccttcttggttgggtgggaggagaatgttcatgatagagaatatgttttacagttagaatgttaaaagaaaatcatatttaaattaatagatgtttgtttagggcaagtgttactccagggcagggattactgaggaaattttagaaaaacattgaagtaagactatgatgattaatggaattattaccctgatgtattctgtggaaagaattaagggggaaaatacattttatcattaaggaaacaaaatatgaattgcatatttaacacttcattaaatatgtagattgctgtgaaatctggtgagaaagttaaggatagtgagatgccataaagccatcatccaacacacgttcatttgttctatccatgataaagtgagaaaaattagaaaagagccggagagccagagttagacagacatgaaaaatgggacattggaaacaaaagcaaatcgctggggatacgtatttccaaaggtaaactagggaccattgtaaccactctgaaatacaaaatatcatttctgtaaactgtgaaatactgtaagctgcatttaatagtgaaaattatgttaaatattatagcaatgccaaatgaagtgattggccactgcttgtttcttgcatttttgatccaagtgcacatttcttattgttgtcttcccattcagattcacaagtggtcagacaacctctatctcagatatattacgtaaacttccaatcatacgcatgtctttggtggttttgatttgaattcatgattctacagtctctgttccccaggattatttaacttattaaaatgatacttgtaaatctatttttaatatttgtgaaagtcaaaactctcctttgtaatttgcatatttaactcttttttcaaatacaatgtaatactaacggagcagctattaggtgcttgacactgtggttaatagttttacatgtatttttttaaatattaataataaatctgtttggggtacatattttatgattaaaaaattacaaaccagagaagttaagtaacttcccttgagttttatacctactgctcacagttctataaagcttactctgtacttaattctactattagtgaaaagacattcagtttttgtaaaatgatttattggagggtttgaggatccactcagtgataaataccctgaggctctatgcaaaccctattttgagaaagaacacaatttaaagattctcttctaagtgcctaacagcaacgttgtattttggaagttataagtgaatttattcaattatttcttctctagttgttgttatccaattgctgcatgagttttaaccaactgaatgactgattttaaaattttcagttttcaggttggcttgcatataaactaaatctaagagattgcttgagaaactgaatgccaatggcctaaatgcccttagctggtatagttgtgatgctcagtgctaattttactgtaatagatatagaaatagaaataaaaatagttttaaccattatattttggttaactcattaaccaattggcttttcttttcttatggaattgtggtatctgatagcaatgtaagcaaatataatttttcaaaaggggaaccagaatttatgtagatgcatagatagccccataatcaccacttctcacaatcacaatcttcttgcctgagaaaaactgttgttttaatggagaacataaagtttcattaagatacagattttttttcagctgattcttctttatttctgtaaaattcagtagtctagaaaaactttatcttggaaaacatgtagtaaacttgattgaccatattagctttgctccaccattaggccattataccgaaactcttagctgtcagattcaattcagactttaattaaattgccttgtggtctgacctgaaagagtgaatgtcacaggacttctcaggaattaacatgatggttattgcagaagtagatagaaggaatggaaaatcacttaaaactagttagtgtgaaagccctattttgggtatttcccatgttttgcaagcatcagctctttctgacctttagccttccaaaaatcactctaaccattttatctcccttttgcatgcatatctttgccaaatgcccctccttccatattcagtattcagtcattttcttgtgaattctagaacaaccaaaaatagttcttgtatgtctactaagtgctttaactcctatgctggacactgtacagatcatcgtgagcaaaacaggcattgcatccaccctcaagaagcttatattccaccatgggagacagatgttcatcaacacagtctttgcatatgtcataacaagttactataagtgctacaaaaatgtatgtgcaatatgcaaatacattggagggtactaggaaaatatgtaacagaggatcttatccaggcttttctaggaaattgacatttgagttgagatctaaatgaggcactggaattcactgggcgaagttgggggatggtggaggattgagtgctggtggtcccaaactggggaacaatatagacaagacctacaaaaggaagaggcaaggctttcagaaactgaaggatgggttttggggctagatcagtgaagcagagtgggggtgtgaagggagctagagagatgaacagcagcagttcccagaggccctgcaagtcattctaaggcctcaaatctgagctcattagaaaattctatgtgcaaccagccttattagggtcatttaatgacttcttagtttattcctcttgaaataatttaaggatacctagttgtaatgtgtttttaagtaggaatgctctttcttgtgaagtcattttctgttttagaatttctgccaattaggtcatagctatttttcctttggtttttctttgtttcattctttctattactttcttccaccttttctgcttttgaaaataattttcatgtctattcacagtcttcatctctcccctctgtgattatggcacttcaacgtgtcacggtccttttctccacgttttcttgctatacccgtctcatcttccagttctttcttcttggctggaattaagtcctgagtaatcatttttctcattgctttctttactttctggatgatggaatcatcagtgaggcacatcaggaacatatcagatgatgggctctcagctgaatcacactttgagcagatgcacaggtaactgaagcttcccatccctgaagtgccttccctgtatgccatttttaaatattttacagaaaagatggacccacagttttccttcatgagattggttagtattctattcctgtaataacacttttcatttttcttttgttttgttcttaaccaattgctttctgttgtgttttcttttaaaacacttttaggtttaactttattatttaatacatgttcaatctctagaacactacaactaatgattctaagtaatagaacaattaagcacagtgtaacaaaaccataatttgtaaatatttaatatttttaagaagcatttccaagttgatgaaaaactgtatacataataaacaggcaaatactagttagtttcaagttctatcaagttcatagtcagcaatttcagttttgtggggttcttcaaaatgttttgttaaatccacaacattgtttactatggcaaggaaaaggactggaaaatttgccccctgcttgttgaactctctacattcttatgataccacttgacattacttagttgtgggttatttaagataatcagttatttgttcagtgagacaacattgctctgtaagagggtcctgtaagactgggaggggagctcagtgatcagatattcaatcagatcttcttgcatttcccttagtaacatgatactctgggccaggctcattcctgtaatcccagcactttaggaagctaaggcaggtggatcacctgaggtcaggagtttgagaccagcctggtcaacatagtgaaaccccatctctacaaaaaatacaaaaattagccaggtgtgtgtggtggcacatgcctgtagtcccagctactttggaggctgaggcaggagaatagcttgaacccaggaggtggaggttgcagtgagctaagatcttgccactgcactctagcctgggcagcagagtgagactccatctcaaaaaaaaaaaatgatgctatcatcatcatcattttcatttttaaatatttccccaaacataaaatatcctgttttaactacttttaatatatcttgtaacttttttaaacctagaaatttgaaactaatggtaagtcactctattatcaaagcagtaatctaaaattatccaggaaaataatcttttttctgagatctggcacataataatttgctgatctaccaaagacgtatggattttaccgaaataatagttttcatgaggttaggagttttattttgttatcctttttgcaaaatagtacctttctttttcacagagaatttcttctcccattaatatcacggtagataactcagttgatggtgactgtcataatgctctttaagttctaagggcactctaagcgtcatcttggctctgacactgccaagtatgacttggattttctttgcttggaaagttcttgcatggtgctctctcaccacatattcccatcccctgaaattgcatgttttcattttcttagcaactttttctttattggtactcatcttataggtcttcccatttgttgggtttgatgtttggctcaatattgtcactaaagcaacaccaccagcgattttccaggccaaagtattacattaaacaaatggttccatagaatacactctcatggtgctgtagttgctttcattgctaagtctggttcctggagcaccaggcattagaccttaaccatgccatctcaacacagatttggaccacacgcagctccgaagtgtacacacagacacagtgcttcttttatactaccattgactaacttaacacgagttcccagagataagcacatcatatacaagagataaatggagtttgtggataatcttttttagttcaccacagtgtatgaaacagatacattatacatctgcctgcagggagcatgtgctgatgtaggaagacacacactgaacaagtaactgcaagttattgagtgtatacaaggagaggttgcgtgaggatatgtgaattcaggaggaaggaacctcacctgttgatgaacttaacttttcttcagaggaagagatattttaaagagacatgagagaaattccagctaaccagataaaaggactagggattgagaggcagagacaatagtatgggtgagttcaaaaaaccagaatgtggtattctacacaagctggagattttaaattcacaatttttgcatgtattttgcatagtaacataagacttcttgttgtaagcatttctttggctttcacccctgggatactatttgtgcctaggatttttgagaaggtagcaaaacatttctataatgcctcaactctctatagtgagtacattacctaactggagtgagatagtccacagatgatgcaacctttgcaagctggaaagcactttcctcttattttatcatggaaattaggtatttcattgtgacagttacatgaggcattatgttgagctgtcgctaggagcagttagtattatctttttgggctttaaaagcacagaaaacagttgggggaaagtggagctattttggaatagcacaaacaatctgggttggtcattgattttcttatgaatctcatttgactgttccagataaatacaaaatatttggagaataaaagagtacagattcatacgtatcactgaaaactgttcatcttaaagttcgtgttctttgttgtcatcattttcttgtaatgctggcagaatccagatgctcaggtcaaataagaccataagtgagaaataaactgtggtgacatttgagttgacagacataattctgacacgtagaaattattgggaagaaaaacaaaaatcgaaactcacaaatgagagcttaaaatgaggttatgctgtctacttcagaattattttatcacacacccagtacttttatgccaaatatgcctgggtttatgcaatttaaggacacaagagagaaagataagttcttcgaggctttccaggagccaaagtctggcaattgtaggtgcatctctttcagactgaacacatattagagatcagttttaatgacactttttggaaggatttactcaaataagtgattctccctaaaatacgagactagcttttgatcgttgttttttttttttttcatttaaatttttttttcatttttaatttttttttgtagggatgggggtctcgttatgttgcccggtctggtcttgaactcttggcctcacgtgatcctcccgcctgagcctcccaaagtgctggggttacaggcagaacaaactgtgccctgcttaggttttaattcttaatggtcatcaggattattcggatagagcttccgattccctcatactttcctataaatcaacaaggcagagaagccctaaaatttgccttgctgctctacattaaactggcttcagatattgccggtgttctcccagtctgcagggtccctagaaatccacattcaatggttttaaattttgcaaatgttgcctatgggagggtggctctgattcccactatcaccagtcccatttaaggatttttggttttataatttgcatcatttggatctgtttatgtttggcagaaataaaatgtatgactttgaacaaataaaagcttagccactagaatattaacttcaatatctacataaatatttttcttcaaagtagttactttggaaaatgacttttaatgtttctggaattctgccttttagaagtggtgccagagtcagctcacaagctgcacagtgaaaacactgtcactgctttatagtcgaaacttattttccctataaatccaaacagtgtgccattcaactggaacaccaaactattcagtacctatggcaccaaattatttttgtttctatatgtttcttcttaaaatcgatcattctgaagtatcaaaatgtctcatagcttaagtatttataaacaacagactttaagaacaatttcaaaaaagttccccaaattgttttaataacctcagattctttacttgcataaacatagctggcaaagtgactccttgaaaaagacaacactcatttaagtgttaagctatgttacttatgttaaacttattaatgaataaacctaaggtcacacaatcatatgtcttaaaggcaatggttgcaacttcttttctcacttaccttagtacgaaaatagcatacattttttaatgtctgccctgtatcatgcactttgctaaagattttacataaccatgtttatttgtctctaagtttttattggtagtcattttgctaaaaataatgtggctagtcttgaagagatgttgcatagaaagatcattgtacaaactcagcttaacttggcttcaaagcgtatttttccttctaatatttgatggtaatgctgagagattttactcctctctctttccttccttgcatccatcctatcctaacgacaatagtgacatctgaggatgggctatcagctttcagcatttgcaaaccatttcttctgaaactcttagtacccagtgttttcaaagcaccataatgttaactttctcttttagcttttgttttgctcttttgattgcattgactttaaaaatagttttattgttattaaagaaattattaagcatatttttaaaatcatattcaactcaaaaaaaagaaggataaggctagggaggaaggaggcaaaggaaannnnnnnnnnnnnnnnnnnnnnnnnnnnnnnnnnnnnnnnnnnnnnnnnnnnnnnnnnnnnnnnnnnnnnnnnnnnnnnnnnnnnnnnnnnnnnnnnnnnnnnnnnnnnnnnnnnnnnnnnnnnnnnnnnnnnnnnnnnnnnnnnnnnnnnnnnnnnnnnncttcctgagtagctgggactacaggcatatgccaccatgcctggctaatttttgtgtttttagtggagatgacgtttcaccctgttggccaggctggtctcaaactcctgacctcaagtgatcttcacacctcagcctcccaaagtgctagtattataggcatgagacactgttctcagcctctatattcttaaataatattcatgaataggcatatcttttagatgttatctattgatttctattatggaaggtgaatattttaagttttctaccctcgcacttttctttcttcatgtgacttttcattttcatttgaggcataattaatatacaataaaatgcacacatctcaagtgttgagttcactgaattttgacaattttatatacatctgtaaatatcatccaaaataagacatagggcatttttattcctctagaaagttctcccatggtcctatacataagtttattattcccctctccctcatatacacatacaccattgtctgatttctaacaccattgcatagttttatccgtatttagatttcatataaatgggaatgaacattatttcctctttttttctggcttttttctttacactaaaaggtttgaggttcatccatggttgtgtgtgtaccaatacttcattcttatttttttgctgagtagtattcaattacataggcaagtcctaatgtatttatctactatctactattttgttgattaatatctgaacactttctaatttttgactattattaataaaagctgctatgaacattcacagacagatctttgttagcacttatgttttcatttcttttgggtaaaaatgtaggaatagaattgctaggccatataaaaaacagatgtataactttataaacatctaaaccctagagtagttctacaacataactaaaataaaataccattttacaattcttccagaaatggatgagaagcctattcatcttcatcaatatttagtgttggattttaaccactagtcttaaatttctttatgtgtttcttgtgttacctgtttccctaggttcctttttactttttgcttgtctatttttcttgtaggaagcgttcctcagattctagcaattgcagactacccattcatatttaaaagtgaagcactaaaaatataattgaaaattgtgttagtaggcaacattactaaatgaggtttcactttagaacaaccaggtgaccatctggcttttgaggatggtctcctaaagagcagctttttaaagtctttactctggggtggctcagatttcccagagaaaaaaacacatcctcttatctttcactttggatctataaatgtggttcccaggttatagagcccggtggataaagaggtataggatttctgttctgtatacagattttatttttctttttgtttgccgtctcaaaactctgtcttccttttctgtggatttgttgtctccaagtctagggattttaaggttaagttctccccatgtgatacctattctctcctgtccaggtagagaaaacccactaagttgacgtatgtggtggagatgggaatagagagagcagggtgtgcctaacacaaaattccgaacaattgtcttgttttcaacccctgacttactctggtcttctgtattatcaggctgtcctgggatctgtagggtgggtcctttgcttcccaaccatgtcttaccttagtgtccttaggtttgtgctttttcagctctgctgaaaaacattctctacctgtcttctcttcacattccataatccttgattatgtgtgttttctactttcctgaaatgtattgtttttttctcgatttctgtgttttgggggcttaatgtgtttccaagttttaattgtacacgggatgttcagattacactgtacttgaggcttgagggcgatcgaattagagaaaaactgtatttgctgatgaacagcaaatgtagtgtttctgaagagttaagcctaatggggccatttagttcattttcaagaatgcttaaaaggctgcgttagaaaataacacaaaggaacttcagaacctcagaatagggatggcacccagactctcttcatcatgagggttttgagggtaaaagttcaaacaaaagatacattcaccttttaaaatgtaaatgaactgcaatatcagcataattttcttgtactatctttgaaaaaaatacaagcacattcacagtttttctttattctctcaagaagggctttgaaaacccataattatagaatttattaaggaaaaataactaataaatacttctggagaagaatattcaaaagcctaaggattgctagacaaaatatctcatttttagatcaaatcttggaaagatgcaaaagttgttaccgacaaagataagttataaattaagcatattggaaacaagaggaaggataaaacctgacaaattattgatgttgcaggaggtaaccaaggaaggctgtgctcaaatggcactttgatgacctggctttgtgtgtgatggttgatgtgcgggatcacaggaaaaatttcccgcatatatcagtaaacatatataatcaagaacctatgacatgcccatcactgtgtaggctataaagaaatatgagcacactcatgatttcaaacaaggttactttggtagaaaagacagtcaaataaagagatgacataagggaatagattctgagtgccaaccaagtgatacagacagtaagtgtcaccttaactcagaagagacagagaaaatcataggtaggtagagaattgagtcagcacagcaaaggccgaatttgtcttggtcttaaaaataaatcggtgcaaatcaaaatggatgatttaaattttacagcctataatggcacttggcaaacatggtatcattgtctctaagtgattttttttttttttttttttttttttttagctatattaccctttggctaaggctaagacagattcttgcagttcattattgtttagcagatagcaagctttttagacacttttatagtgaaagtgtgtcttctcgctttatttatatacttatagaatcatctttgaagaaataatcaccaactgccaaatttgaggaccttggcagatggagacagatttcccagggaaaatttgaaatggcggggagtctaaccagtgatgtgctgataagaaaaacatccctgatttggagaatttgccagtttctgtgatacaaatagtctcacccttgccaatttcaagctactaacttggggttattgaatcctgacttggaaagagttgagcatgatgagtcgacctgagctgctgtaggcttgctccagcacactgcggaagctatcagacattcacatttcatctagaaagacatggggagggatgctgatccacgcttaagtccttcccctttccattctgatcctcacttggtcttccaaccattgttctttttcagatatatggctcttgtgacaagattataaaagtcaaagatgctttatcccaatatgtatcttattcatttaggctgtcaaatataatttagtttgttatccatagcagcagtgcctcattgcttgagcaggcatgcggcagtgatgtgaagagcaggagagagtggtgtcaggacctgaaagggtgtgcacctgtggagtagctgtttattaggacttgttcctgatgcaagcatgtcaggccagggttcatcttccaaaaataggggtagcaattccagagtcctccactgatttatggagaaggacccatcattctgtaactctgaaagctatgccaagaacaggttattcatgtgagacttcatttcctttaatggatctgggacaaaacttgtagtcatgtttacaagccatgagtgcctgcaccactgtggtggcatcccaatactaggatatttacctagagctatatgaagcagaatcatcaaaccataagtaagaatcttgttagagtttgtttagccacaggcctactattagggaagtactaactcccttcatctaaatttctacatactctaatagtcttcttagttatcacatggcattgaccattttcttgttgtctgtattagctcctgctgcaacggcagttatgaaatctgactgagtttgtgccaaggcacagctgttctcactggtcttgcagatgcccagcaagttgctgggaatacccagatgaagcctaaagctgctccagatataaaactgtccacactagtacaacttaaatgtagtacaaatgctgtaagtttgcaatatccctcagagattttaatggaaaatccaagtactgttttagtttttttccttttcttttgctgataaccccttttacaagatttaaagatgagtccacagggttggactgagttcagtggtaacacattctctacccctttgccctgagatactttcctagaatcacacatgtgtgttttattcctttcttgggagtattctggttttgatcccttaacctattcaccaagggagctctaaataatatcatccaccactttcatgggccactcacatttcataaagattgcaaaagagataaaacagaaaactattagtggtacattagctacaactcctttctcttccttttcactgaacacagtgaacagaaagactcattggcttgagagccactgtgctgaaaggcttgtttatgagttcccaacatcttcaaataggaaaccactcaagagaagtccagataaaagtcaagggttagttaaagccaggagatacaacaataatgccagctatgaaaagctgagccaggtcatacaaagaagaataaaattcagagtttagatgttggaattaagaatgcatgtcagttaggctggaaaaatagttgagaggagagaccatgaattttattggagagcaagagactatttttatggagtaccagctaggttaatggagtcagatggggtgggatatgtgaactgtctagaattatttactttcagccagtcatactcataactgcaaaaaggacaagttgaggctgtgcctctctttagaatgtctgcattttaaatatctatttacagcaaatgatatgttgctgtactgcaggtttattagaacactagcatatgtgttgacaaggcaaaggtatgttaaatatctttctggagagtcaatcctgataaagcaggacatgcacttaattatagtcatttaacagtggcttttctactttaattatagttttatataatctatgcatgacaagtctgaataataataaaggaggaattataagctgaatatggagaaggttttggaccctgcctgcttctgaactacactctcaatctggattatatataagcatatataaataacatacactcctctcaagaatgctgcattactagagccttacactgttcttaaatatgaaggagatttgttttcaggttattggagatacagagattcacagaactgccttgagggacacattttttatgtacaaatatagcttttacctagccagttggtaggtcaaaacccaatggcccagggaaatggtttatctcttagctcagaatttgactctgtggtgggtagactatagttaaaagaaatgatttttttgacattggtcagaaagttatttccttatagtgacttattttgtccattcacttgtacctagaggttttaaaagacagacacattaaacctgtggctagaggtggggcttacagaagcaagagtgacagtcttcaccatcaaatgcagttgacgtttgcaaatgacaggagacaaactggaaattgtattccctcaattcctagcagctgattccgactcattcataccaatattgtaactgttgtcactcttcagagtccctctgggacattagtactaggttgtcagttgtcctgtagttaggcatctatgacgtgaacaccaataggaacctataattgctagaaactcttattcatttgttttagtgtgttgaaatccattatatttgtaatggattttccaagtctcactatttgccagacaccctctctgcacccttgcttctcagcttattggaacagactgacgggaaaactatgccgctctcttggtttctagggtggaatttcaggggagaatgatgggagaggccaggtaataaaaaagcctccttccagagatgatataacttggcagccttaagctcaagagatggaggtgggatcaggatgaaataagagcatgggaaatcaggattcatcacacaaataaattttccattaatgtttgtggattaaggataataagggaaagaatgccagcaaaaaacatgtatattttatgcaggaaaggcaataaaatttgatattttgatttttacactccttatcccacatctgaatataattgtctaggattgcaggagttattttctgcaagtgttgctggtaattcttcatccagtcttcttccagtgtgggtacagttacgaatattgccacctagggctgacagctgctttcaactggacaaggttttatggtttctttgtctttcccccaacccacaaatgttctcaaacctcttgcatttatttatgttattttactttgcatgaatgggggaagaaacagtgttcagcaattcaatgatggctgaatggaataacagaatttcatttcctaagggaacatttgagagtgattgaatcaccctcaatctacaagccacatttttgcactatttttctacttgactaattgattatgacaggtgtcacccaagctttgcagcttaggctgtccccatgctaagacagagccatagcaagcaacttctattgatgaaatagaaaagctatgcatggttatttttccttattgattttctagtatatgatgtcagttaattactgagagccattcactgcatacatgtaagtagtcattataaccatattttcaattgattttttccctacaaacataatcagttatttgtttgagctgaacagaaatgtaaatatctgcagttgtaaaaaaaaaattggatgtgtgtgtgtatgtgtgtatgtattatatgggtatattctttatgggcatgtgattttatctatctatctatctatctatctatctatatatatatacacacacacacacatacatgcatatatacacacacatacatacacactagatataatcaatattatatgcccatcgggaatatactccctgtaacatatttacaggtgtgtttgtgtgttgtgaacagagaaagaacagcacatgtcatggccatgctaacaattttggttactataccaaaagggagatttctaaagtattgagctttaagtatattgcatttttagtttcgcaagacaatgaaaaaattagcctatctaccttatgtggagggaaagaagccagatacaccaaaaatttatttgtataagtctacttatataaaattctaggagatgacaactgaatatatagtaacagaaagaagatcacaggttgctaggaactggaggtggcaggagggatggaccacaaagggttatgaggaaactttagggttgataaggtatcttgtgtctcttgcttgtggtggtgattttttggttgatgtacctgtcaggattcatcaaattgtgtatgggcacagtttgttgaacagaaatcatgtcccaataaagttgttttaaaaatgaggaaatgtatgtctcagcatttgaacactatttggagaattaccacaaattttccatgtttctaataatattaaatcatttctacatatggcaggaacttcatatttctcagaatatactcttggaatggaagtgattatatccatgatatatattgaatgtccaggccctaaagggccattcggaagacatttgagtttttttctagttgacttgataatttctacttacctaggaagaggagagcaataactaacctttgaaaatttctcatattgacctacatgatagactgatatattcattttcaattagtgtataacaaattactacaaacttagcaacttaacataacacacatttattatttcaaaatttccatgtgtcaggagtccaagcacagctttgctgaatttgaggtctccccaggctccaatccaggtattggccaaggttgaggtctcatcagaggcttgactggggaatgatccacttccaatctctcagattattggcagaattcttctgcatgtggccataggtctgagttccccatgtccttgctgactgatacctgatgactatcctcagaactttgaggccactcagcgttcctggccatgtagcctctccataggaagctcacaacatgaaagctcacttctttgggatcagcagaagctcttctttcagtctgctatgacatagctttgtaaaatgttacttaactatgaaggtaaccacctttgccatgtaatgtaatctaaccaagagagtaactgttttataaattttgctatattgtattgactagaaatccaactgtacccagtggaagtacagtcatcttagatggcttgggccactttagtgcatatctacctcagttgttttatagaggacccttgaaataagtaactttctaataatatatttaataaagaaatatttgaataaatttatatacatatacttaataattttagcagaatgtcattcaattttaaataagcaagaataatattactatttttttttcaagacaaggtctcactctgtcacctaggatggagtgcagtggcatgatcatggctcactgcagttgctgcctcctgggctcaagcagtcttcccacttcagcttccccagtagctgggactactggtgcatgccaccatgccctgctaactgttttttttttaaatttttgttttgtagagacaggatgttgcagtgttacccagggtggtcttaaactcctgggctcaagtgatcagtccacctcagcctcccaaagtgctgagattacaagcatgagccattgtgcccagggagtagtacttttaaaatctggtctaatttatactggtttaatttttataaaaactctcaggaccctacctattgtgtcgtcaggcatgtctctacatggtgcaccaggccatgaaggagttaatgtgcctctctaatgctgtcaatttccatcttcctcgtcagtaaaataagacctataatttgcaaaatgaatccacattcttgaacagtgactgcattaaaaaacctgagtattttaataattagctattcaaattatcttatggttgcctactattcataaagtcaaaaacataatataaaataacatagatcataatattagttacagatgtcagcttacttctatttttctgaagaaaaggtgttaatgaatttctctagaatgatttctgacataattgccaggattgtacaatatatcattctacatttatgccagcaaattagcatctgtgattcatacagtggtagctttcttaattttatcatgtacaaaatacatgttgttttgatttttcaaaataactcatggctctctgccttgtagactgaagagaatttacaattttgtcgttgaattggtgaatatttcaaacaatatgacagacactaacaatatacccttgggtttacagcagaataaagctgctactctgataagctaccaaatactgtaaatgcatcaataatttcagcctgaaaaatattacttttttaattgatgcatttttctcatgacaattatacaatacttagcacgcaatattcactttctaataccagaaaggcagctacagatggtgtcaatataaattgtttgtaatattctctgtgtttgtacgtactatatacactatgattacatccaagagctcaggtttgcagaccttttctgcccttgtatttgtgaccttgggtgtacttctgcactatccaatgtctctcataatgcaaaattacagtaatatccacttaatgttcataggctgctttgtacaattacagttacacagcgatcactcaaaacacagtgataatacaattcctcatcaaaataaaccattactggccaatgtttgtgactttttccggactaagccactctcctggggctggcaatttatggtgcaaaaagcagcagaatgtgctatttataattatgcagctttcttctgggatcagaaaatcactggacctcattcctaccttactgaaagaggaaatggtaatttatgttgtgttatttgtcttcaaaatgaggaaatagggtcaaaggaaggataaagtgtccaatgtcatgcactggtaaaactggaattagtagttaccatctcatgatctgatttctagttgtttgtttggttggatttttttctttgttgttgttgtttgttttatcttgaataccttttttgtttaacaaaaacttattgtgcacctgctatgagtcaggcattctgtatgtgttttataaattttaactcagttgactttcaagcttaggagttagctgctgctattgtcacccacattttataggtgaggaaaccgagacactgagaggtgaggcagtttgtatgaggacacataactggtatgtggcagaggcagtttggctctggaatctacacttaaccactgttctttgccacctctccttctcctgtgtgacttgtctttatcctccaggtcagaaacgcatcacataaggcctatttcctcccaccatgatcactagtgcttatactctgtttaccatattgagtcagtcaccaaggaggatacaaataaagaatgtgagctccaaaaaggcagacggtatttatcttgcttactgaatccccattacctggaacagtgcctgatacatgaaaaatattcaacaaaaatattttgcatgaataaatgatcagatgaatagatagataaatggacagatgtatgagatagatatgtaccttgttttaagggagcttttagtttaagaagacaaaccataattcagctgaataaaacattttatgattttttattcttttcatatccttcaaagagtgtttctataaataaaactatttcagtcttggtgaaacagatttgctcagttttaaaatatatattagaaaaacatatgttaaaacccaaattaaacaagcttttatctgcatggctcagtgtcaactcagattaatttggtagaggtgaaaatgaattctttcgcagaaattatcttgccatattttaggatgatgtttccgtatgggtggcatttttatgagaggaaattgagagcagaataacgaatggagttgggagaatattgcaggtgtcttcatcttaaatatgcccccaaatataatagagtctgcacagagattacatgctggagttagtagaaaggattcggtagtttgttttcatatccttatcatttaaataaaacattgtcatgtttatattttttcactgtaggtcattcaatttctctcacacagagaaatatgccgaagtagggacacattcaggaagggaaactagtaatcaagagacaaaaaattgatttttgtataaagactaatatatgctgagggaaaaagagaaggaaaatgtcagtgtgtggtaatataggaggtttgagtgattgattaaagattggaaagggaagcccgacaaagggaatttcatcaaaatatataaaaccaaaaaagacatgataggtggctattgatttattcaataaattgtagtatccttcaccccaagaatctactcaaactttagaagagtttgttttaggatgagttataaataaattcagataataaactcagcgagaaatttaatggcacaagaagttcctcaataagtcattaagataagtgatgagaatttcagtacacatccctaaattttgcagttggtgtcagagtcagtcaaatgtttataaagcatgaatcctggttaaaaaaaattatgtcagagaaaaatctaccatactcattgattattgagtttataactagagctttcttcatgattattattgagacaaatgatgatgaaagtccctagcgacctctgtttcctgtttgttaaagggctaaaaaatagtgaaatgatttgaatatagggaatgggaaagtaagagaaccactgtgtatgagtgggtatcctccaaaataaattgggctatgtttctgagccaatacgtatgaaacaaagggtggaccagaatatatgtaaagtgaaatttaaaattatttatcataatcgttaatagtcaaagatggggaaaatccaggaaggcaaaaaagttgaaactgctagcgaaatgggtttcccagattagccagaatcctaaattgccgtaaaggacacactaaattgtctggaagttcatcctaggttttagtgatctgtgatcattttaccctggactagcatgaggagcgaactatgatgtgtaagattttggaaacactatttcagctgactggattttgtggattctttcaatgacacattcctttcatcagagtcattggtatatactcttcagtaatttttatgttttgttttgtagctttcttgtggtacattgttctactgctcacttcttgcctctctcctctccatggttgtgtgtttacaaaaaaatgaaacttcccacccgcaattttgaattgtattgtcctggttatgattacttttcattttcttgtcatccttgatactgtgaccagtctttctcagggaagtacattgaacaccaagctacctgtggtatgtccatatgctcatatgctctgaaacaaaccctgtccaacatgttgaattcctttccctaggctctgcctaagtgcaagccttgtgattcgcttagtccatgccctctgggaatttgctatgcccactggagcacaactgtcttcccaccctgccacctttaattttattagctattagctgttacctaagttgaaaaatggaatgacacaggaatgtagttgaaatccagtgcattactccctaggatgaaaaacaaagtagacacacaggctgactggtgccaggtgatacaaaagcgtcagcatgaatcataaatgctctggtggatgacacttctcagattgatggctgcagtctgaacgctttgtgtcttgggcctgtgtttggaagtcgggtggtgcacattcttttccaccctttagaattaatcttttcacactggctgatagatgttagctacaaacacagtaagaatcctaaaacttaacactgtcgttgttcctttttttaaataagttctttactcagaaacaaatgatgcactcctaatagataaacatccttttattatatgtcttcatggagtctactcttttttagacaaacactagtgctaaccacattagcgctgatctttaactataatttaagcaacagtccctacccctctttaaaataaacatttttatatattgtagaataattttacatttacatgaaaattgtaaaaatatagcagagctcctatataccctttacccagttttccactgctaacgtctcacatgactgtgtatttcaaaactaagaaatcgacgttgctatattactgtgaactacagtccagtctttatttggatttcattaggttttccattaatatcatttttctgtctcagaatccaatcaagggaacctccttgcatttatttgtgatgtcttcccagactcctttttctgtaacagcttctatctttcccttttttcttgaccttgactgtcttgaagaggattggtcaggtatctcaatctgggtatatccaaagtttttttcatcctttagactggtattctttttggaaagaataccacagaggggaagtgtacttcttgccacataatatcaaggatacgtgacagccacatgacatcactgaggataataacttttaccactcactaagtggtggctgagttggccagggttttactctgaaattaatattttttcatctccatactcttttctttggaagcaagcatatcaatctagcccactccccagcctcctcacctctttttttaatggctgcaatcaactctatgactaagatctaacatgattgtaccacattctgtgttaattatctaatacaactctagatagttaagaaggcagtatagccagtgtgctgacagctgtatagcagtgactcctccttttgagaatacaggttggttgcccagaaagagtttaagaataaaactcttacaatctccagatttcctatcccttacctctacccaaaagaattagacaccagaacagatagtttacgtgtttggctcatgacatagctggatggcagagaggggtgaagtcacctctggttcatcttgaggatttttgtcttattttctagtcatcccttagtgaatttctttaaatatcatgttatggtttgtgttcagaccctagagcagcaggaaaccagagacaagagtgagttaggttttgtaactctatcttcatgcttattgcagagtagctgcagaatcgcaaactacatgttatagtcagtaattttaaaatgtttcaggaagcgtggcatcaagttgtgaactttacacaggtaattttttccttctgtcaaaatatttacttatgaatgtgttatataatttactttttgctttaagtagccacaggtgcgagaatgattgtttccatcccatttgaagcttaacaaattttcacactttgaaggtgaaggccacagtgttttgtattcttatgttgacatttattatactgaaataattctctttggtggaattaataattacttggaggatgaagttacaatagaatattcaaagatattgaaatgaaaggtacatatgctgaccctttctattatcatcttttctaactgtagcttacttaccaccttcttctctttgaatagtttgatatgtaacagctctgcatattagggatgttaatgcttttaataatatggaaaatgtctcagattgtcattcatatttccatctccctattatgtttcctcatgtagaagtttttgtttcaatacagtcatatttatcaatatttcttttcatgggttctggtttttacattttcttagaactcccttcccatttcaatggtgtattagtctgttctcatgctgcaaataaagacatacttgagactgggtaatttataaaggaaagaggtttaattgactcacagttccacctggttggggaggcctggcaatcatgatggaagagcacgggacatcttacatggcggcaggcaagagagagcttgtgcaaaggaactcccccttataaaaccatcagatgtcatgagacttactcagtgtcatgaaaacagcatgggaaagacccgcccccatgattcaattacctcccaccaggtccctcccacgacacatgggaattgtgggagctacaattcaagatgaggtttgggtggggacacagccaaaccatgtcaaatagccaatatctattcacttctgaatttccaatatatagtaaggtggtgaaatagtcaagtcaggggctggtgccatttgttttcctttatattttgagactgtacgtaactgaactcaaggtactttatgggcattatccactgtatttgtgtcttgatggtcatgtgggagaagagggaagtttttacaatgttttcagtttggaagaaattcaggaacaggagataatataataaggtcatatcatcaaattttattgcttttatcccctaattctcatctttttctgtattatgctatctttagaaccagtgtgctatatggtctgagtgtttgcgtccctctaaaattcatgttgaaacttaatccccattgtggtggtattaagtggtggggccttttgggaggtgattaagctgtgagggctctgcttttttttttttttttttttttttttttttgagaccgactcttgctctgttgcccaagctggagtgcagtggcgcgatctcggctcactgcaagctccgcctcccggttctcgccattctcctgcctcagcctccctagtagctgggactacaggcgcccgccaccacgccnnnnnnnnnnnnnnnnnnnnnnnnnnnnnnnnnnnnnnnnnnnnnnnnnnnnnnnnnnnnnnnnnnnnnnnnnnnnnnnnnnnnnnnnnnnnnnnnnnnnnnnnnnnnnnnnnnnnnnnnnnnnnnnnnnnnnnnnnnnnnnnnnnnnnnnnnnnnnnnnnnnnnnnnnnnnnnnnnnnnnnnnnnnnnnnnnnnnnnnnnnnnnnnnnnnnnnnnnnnnnnnnnnnnnnnnnnnnnnnnnnnnnnnnnnnnnnnnnnnnnnnnnnnnnnnnnnnnnnnnnnnnnnnnnnnnnnnnnnnnnnnnnnnnnnnnnnnnnnnnnnnnnnnnnnnnnnnnnnnnnnnnnnnnnnnnnnnnnnnnnnnnnnnnnnnnnnnnnnnnnnnnnnnnnnnnntgtgaggacgcagcaacgggtgtcatctatgaagcccttaccagacatcgactctgatggttggtgccttaatcttgggcttcctagcctccagaattgtgagaaatatatttctgctgttgatagattacccagtcaaggatattattatagcagcccaggtggattaagatgcagctattacttttagaactggatagtgaatctgtcattgagttccaaattctgtcccaaatttggatgaattgttttcaactagaaaacaagggggaagaagagagaaagaaataaatagaaaaagaagaagtaaaatagagagatggaagctactgttgcttcatagcttgatagagccttagtagtgattttagggactgatgtacctgcacctggaaggtatttaaccagctgataactggaagagaatatagtcctttgtacttttataacaaaataccacagactgggccaggcacagtggctcacagctgtaatcctggcactttgggaggctgagatgggtgggtcacttgagaccaggagtttgaccagcctggccaacatgatgaaaccttatctctactaaaaatgcaaaaattagctgggcatggtggcacacacctgtaatcccagctccttgggaggctgagtcttgaacctgggaggcagaggttgcagtgagccaagatcatgccactgtactctagcctgggtgacagaacaagactctgtctccaaaaaataaaaataaaataaaacaccacagactgggtgatttatgaaaaaaaagaaatttatttcttacagttctggaggctgggagcacaaggtgaaagcatcagcagatgtggttgtctggtgagggctgctgtctgcttctgggatggcaccttgtggctgcatcctccatggagcaggaagttggtgtcctcacatggtagaaggaatggaaggggcaaaaactggggcaaactctttgccaagtccttttataagagcaatgattcctatttacgagggcagagccctgatgactcaatcacctttgaaaggccatacatcccaatactgttgcattggagattaaatttcaacctgaagggtagagggacaaaaacactcaattcatagaaagccttgtctacaaagccaattctataattctttttactttattcaagaaaaaaaaggtcactgattatacataccacttacatcttgatgagaattagtgaacataggaatacctgccaagcgtatgctttgcctcagctacaatagcaacaaggaattaaacttaaaatagatacatttgttatggtggatgaacatctgtatcctatgttttagtattccacatgtgctgtgttatagtttgaattaatagatgtattgatcaaccataattcaaatcaatatggatctttaggtaaataatacatttaatgatttttttaaattaaaaaagacttttaaaaagacccatcttttctagaggaattaatattgttctatttagagtgaccagggggaatactgactttgatgcacagccacaatttatgatcatataatgtgttttattaatcatctctggtgattattgtttttattgtcctactttatagatttaaggtgtaagtactaggttcaggtcaatatgcctcttctatggttgatagcttagatatcattttcttcactgcagtacattaagaaagaaaaagaatgagctacatgagtgatgactcagctgtggttgcaagtacatgctcaccgtcctccttctcagaaagaggactagaagtagtcggggcctttttctttctctctctctcagaaatatagaggcctggatggtcatacctaaaaacaaaaaggaatctaaggaaacatgcttcgtatacatattatgcccccttttgttttgcagtgacttcataacagtggcataatactctacgtctatgaacttaattggaataactaataatttatcttagttttataccctcttttatttgcttcatttttatttccctttaatttgttttggtggctataaaatttagggatgggtagcaaggggtaagagccaagtgcactgcacacaaatgcttaataaacctcactgccatacacagccagtacattcttggcctgtggtgccacctcacacacctgttattatcctgtctatctgaaacacagtgtttagtgaacctgtcattctgcaactctgattctcagataattttttttagattgaaatgaacatatcctagaaatgagcatttccacagctatcctgacaccatatccttgagtaaattattttaaaatttattgtaagtcctatagggagagttggaagttagccatcaagtatgattggagccattttaatgagttgcctagtatcctacaatggtaaaaagagctcttaaaatgacctacattactaaagagagtagcttaaacctttagttcttcttacttaagttgtattatcttccatgtatctttacttgagtttctcactggaaacatttagttgtttaacacacacatacaaaattaaactccctagcattgataaaattatttttttccttaacaacacaacttgtcagctattttactttagtagtgtctcataaccaaaggaaattgcagggagaaagcactgattcttaaagcctgacatactgatctatatcagcaacgcatgtgttctttagacgttcttcaccggcagaggacaggattgcctgccagcctgggacaaagcaccatatggctgggatgaggggaaggatggtgatgcacatgaagggtgggaggggagctgtcacagcctgtcagtctttattcccagaggaaactctggtgacaagggagtgattgaaatggcacgtttggggtctctgggcatggagaatggataaacaatgactgggaattcaatgacataaactcaagggaaagggtggaaacaaagcgagctgcaattgggtagaagcataactctcctgtagttggggaaagatgccaggaagagacattgatgagaaagatgattaaaggtggcctcacaaagccttggaatagtgacagatggaaagggtgcaatgattagtaagaaaatacaaagagaaaaaagagacctgaaatgaaataaagtcttataggagcagaaatatggaacaatacaattttttaaaaagaaaatgaatgatagatttttctctgcaacctgaaaagttaagtagagaaggatgtacaagtgacgacgtactttccttccacagacgaagcatgcttgtcctcaacttacttgatctaccagactcaaaactagctcagaacttcccaatgccttttttttttttttttttttttggacaaagtctcgctctgttgcccaggctggagtgcagtggcatgatctcggctcactgcaacctccacctcctgggttcaagcaattctctgcctcagcttcttgaatagctgggattacaggcaccccccaccacacccggctagtttttgtatttttagtagagatggggtttcaccatcttggccaggctagtcttgaactcctgacctcgtgatccacccgcctcggcctcccaaactgctgggattacaggcatgagccaccacgccccgcctcccaaagcctttctatgagagttcctacatctccagacagccattaagaaactggacgagcagaaataggctttctgctctcaagatctaaagatagacaaataacaataataacagccgtttattgaatgcaaatcatatgctaggtatggtgagcagcccttagactccacttctcattatcacttaacaactctgtacactaaatattttgtatccacttttaatgtggaaattaaggcccagagaggctaaatacctttccaaataacacagtcacagagtttggagtagggagcaaggttcataccatttaattgcagttcgctagtcaaatctatttatttacatacatgatgccctagccacctcgccaagctgcctgtggtacttgctgtatcttcataaactctttaaaaggcactttcctaaataagcaacttggaaataaagaaattattaaaagcatatgatatatgtttttacatacctacaatgtgcagatttgagcataaaacctttagttgctcacatattggttggccagtttatcagataatatttttctcctccttttttctgaaaagagctcaaactctgagagctatagttatcgttgctgagatgaaaatacttcccgaaattagtttctcagtttatctctttgtgtggccataggaaatcctttttagcatacaacttttatttggccatactctttgctgtatgattctgggataagaatcacactttctataacagacccgtaggtccccttctggatacaaggtcagcccaaaccaaattttcgagcttgctttttgcttcttaatgaaagcattatttcccttaggaagcatcgttatgtgaacacacctactttgtttggcacaatgtagaaagcttgccaccagggcttcctctagggatcaaggctgacaaactgtgacagagcaggctgtgatatatttccccttctccatttggttcaaaataaaatgttctcaccccaaacctgcatttccttagaaccttcctctgagcttggtttttcattctactttgtaatttatctgcaaattaataataatgaacataactagttggcagtaatgctcagtcttctcccagtgcatattctcaagcaaccactgtacagagttctgaaaaggagtgttccagccaaagtcttaacataatctcacaaatttgcaaagccttccatttagctggaccctgcaataatttaatgtatacctgtgatatggctaacatacactgtgataatgatggaggattaaagtgataaacagtttagacttggttccttctttcacagagcatacaatttgtaataggatcacaacaacaataacaaaaatgaccggattgttggagtccagggaagtgccctgacaggagagtttgtcttgtccagatcctgtgaacacccaggtagaggggcctaagccaggctggagatcagtgaggtgacactctaactgaaacctgaaggaggcccccacgtcagggcagcaaagcaattggaggaaggtattccagctgagtttgcagcacacaaaagtagcagaggtgaaagcatgaggtcttcctggaattgagcaagttcagcatggagaactgagaggtagcaaggaggctgttctgaaagtaaagtctctgcacactcctgaaacctagctccgcactctcagagaccctcaactgtatctttcaggcttagatccttcaggccctgtcatgctgaagacaactgagaaagtatagctgatatggaaggagtaatgttggaggtggcagcaaatgcatcctggagggtcaagccaagctgagtagggggtatgaccaagctggttttccctctgggatttgaaaatggattgaacagcttctcacccagtgccttgcacaaagtatgtcttcaattaacattgaatggattaataattggatgcataaattcattttatcaaagagtacatacaaggtatgattcaattccatagcactattattatgatagttaatgtacaaattaaataggtatctggaaacagaatagaaatcatttagtgaggtggtgtgttctaatgtctaaataacttttctacccaaactctagaatggaactcatttgtaagcaagtgactgtctctaacttttccatagtcttacacaggtacatcttgagtcctcaaattaattgcctgttctctaaggtcaaaactcagggcttaaaaataaattattattagcttcatgcgtaacagtaggaacatgatagatattccatcaatattcattattcatttttatctaaaatgtacctatccaatacattattttatgtgtgtgagataatgcattgtcaattagattttaccatttcacaatgtatatatgcctcaaggtatcatgttatacaggataaaagcatacaatgttatctggcaattaaaaacaaataaataaatgattatttaatgagattttatggagtacattaagtttcatctcattaagattaaaaatggtttcaaataactattttataaaatctacatttcttactttttctaaagttcttaatctactaccacaaaagtcatgattctttccattttgaaaataatgtaacattttagaaaaaatattatttcattttaagttttaattatacacaaccatgcttctttttttgataattttatgaaataactttatgaactgtaaaaacttaactatcatttaggtttatccacttcttcatttagacaataaaaagctagagtttagtgtcaagggaacaacaagaaaaaaaaatcaaaaggagaaatgatagttgtttgctcttaggaaaattaagtgtttctgttatttcactgacaatatctagttacatattatttttattaaatggtgaagatgcagactaataaagcagatgcagctaataaagcagctagttgatttggtggctacatttgtaatattttagtgagcaacatggggaatgaaacaaggaaataggtctattggcttgtttgaggtttaatgtaaattaaacatttttgttgttatgagtaccccttatctttcatatacatcatagggaatgaaggtagtggactatcaataagcttagaaaaaaattcatgttcataaacactgtataataatgtgtgacagaaaaagtccttggtatctagaaaaattgaagctttatttaaaaaattaatccaatagcatcattgttaccaaggctattgcaggggacctaaacaaaatattattttttggcttcaaaactatgaatatttggcttttcgttatctataaaaattatcaccctttcctggatttggctattattaaaaaatttttaaagatgttcttaaaagaaaaaaaagactgtcattatagtgtggcaaattcacctcctcttctccatgacaacagataaagaagctgtagctatagcaacagtaatgggccagagagattagggccagactggagattaggcctccaagagcaaagaaaagaagtcctgattggttctttattgagaccttatttgaaggcaagttactgttgagagaaagcatggaggattagtaagaacaaaattaattcccctgtataagataagaagccattcctttgttaaaactgtgttccttccgttttaatataacgcctgtttaaactgaggtaaagagtccgtgattaattctatgctgagctttgtgccatctgagtctagaccagctctgtgagaagacactccctgaagcctaaggagaaaagagggaggagcatctgcctgcttgccattgccccttgccctcctctctggcactccctgggtgggttggagatgccaattggtttgtgatgttgacatcatgtaggagtgagatgctcttggaggaaaaagattggaaaacttccctcttgttcgtataaaacttatttgtctaacttcttgaaaatttcaaaaagctttcaccaagttataattaattatatgtttaaaaatacgtttctcaaaaatctagtaatgttcccattttttaataactggtaagttatagaggtattacattttgagtaaatgtgctatctataatttcagattgatatactgatgaaggagggatttgttattttttaaataataaatttataggaatgagaatatctggcctgatgctatgaatttttttaaaaggattttgccacatttacttctgaacatgtagtgctcacacacacttcaactgagagcctgtgagagcgccacaccctggccgacatgagatattcaccttctttaaagtggtctccgatagaattttttcagactctgttttaatgtgtatttcttgcattatttgtcaagttgaaccccacttttcaataagacgatttattattttaaagatttaaaaacatgctttttaatattatgttacttggtttttatatattttctaaatactttcagtcagtctttccacgggaaacaacacctcaactaaaccaagagggaaagtaggagttatacagatgagtgagaggggcttgttaaggtttgggatctgcttctgtgaaggcctagacaattgcagggggctcagcatgaggagaacatacttaatatagaagcatcaagaagccaaggagcttccacataagcaccatgagaacattggcttcgtctgttgttccccactctctcttctgtgcttagacaaggaggacaggcgatctgagctgttcgaatatttgctgagtgagcagagctactgaacgttgctaactgtgcacctctgcaagcctctgcccgaaggtattttctgtcttgctgtaggaacacactaggccattgtttaggaaaggcaaatcccctggaatcaccctcaacaaatgatggagaaggagtaggtagataaatacccctatccactactctgagggatgaataactctgaggcatgtcctgtactgactcccagagtccccgatgggatttgcccttccgtttcccacaggtatagccatatagataatgcactcttcagataggtccctccctgccctgtctcacttcctgattctctgcagtatttctgggatcatctcccaaatgtagtacttgaacaaaagtcctcttctgaagccttgtttacggagaaagccacccaagacccatggtcagcaggagtcaggccagcaagctaattaagaagtttgaagcttgccctgaagacgatttgtggaggaaaaataagtagtagagtgacacgaccagatttatatttttataagctcattctggatgctgcacagagaatatatttgaggaaggtgagtttaaggaaggcagaggagctgggggacacttgtggtaattccagttagagagtgcaatggtgtcaatggaagcatggcagtggagacgcaatagtgtgggtagattaatgagatgttcaggagcggggaaccctagcatgcggtgagtgaaggagagtcaggaatcaaggatgggcttcgggtttccaggctgcacagctgagaggacaacttgaatatcacccaggaggagaagcaggctgagggggagggagagaataaattcactccagtgtgttagtcttagctgcctgtgatgtgtggaagtaaaagtttttgtcaagaagcttaatatcactcatatttttgagagagatacgccatccccaggcatcaatcttttcctctccctcaccactctgctataaaagattgactaactcactgccactcttccatttatttaaaatactgtactgatccagagagcaaggcgaaattttatctacaaagaaatagtcaaagaatctatggagtcagaaataactttgaatactttttttttttttgccattctttaaaacctctatttctctgtatagctagtaagaattgtatatcgataatgtttctggaaccattagaaaatggggtatttccactacccagatgaatttttctagctagcagaagtttaactcatggcagtgataccactcagccagtcgctatacaaagtgaatgcaagaatgaagactgactttgataaagactagggaaaatggaccacaaaagccggtttgaagattttatatccgcaaatgggtacctgtgatttgtggctagagatcacctgtcgagatgaaacacgtattccctagacttgagaactttaacaaacataaagaaaacagagttatcacagcaaagctgaattatgaattcacacacacccaagcagacacacactacaaaatatacatgcacatatgtaatagaaaaccctgtcttacatattattaattcccccaatttgtgaaaagacagttttttaattgtgaataattcagagttgttcttatgaacaagtccatgaaaattgcttctactttttgttaactttcatcagcttttcatttctgctcttaattttctatggtcttaaaaaatacataaataaaccacttcaaattgtttccaaacaggctgggagaggtggctcacgccagtaatcccagtactttggaaggccaagacaggtggatcatctgaggtcaggagatcaagaccagcctggccaacatagtgaaaccctgtctctaccaaaaatacacaaattagccgggtgtggtggtgtgtgcctgtaatcccagctactcaggaggctgaggcagaaataaattgtatcagaacagtgtaaacatgtagacagatactgacaggaataaggttttgtgataactttttggttacctgaagcatttatgaatacaggtaagtctgtggctatgttatagaatattgaggtctccattggtttgacttccaaattagcgctttattaaactcggtgtcagtgtttgtacacctacttgggctgtatcttttctactatgaaacatattttaactgtgaaatgaatattttaaagaatcaccttggggccaggcatggtggctcatgcctgtatctccaggactttgagaggccaaggtgggtggatcacttgaggtcaggagttcgacacagcctggccaacatggcaaaaccccatctttactaaatatacaaaaattagccaggcgtgggggcacatgcctgtaatcccagctactcgggagcctgaggcaggagaatcacttgaacctggaggctgaggtttcagtgagccaagatcgtgccagtgcactccagcttgggttgcagagcaagaccccatctcaaccaaaaaaaaaaaaaaaagaatcaacttcgttaccattttttaatacataagaagagttttatagtatgtgatttttctttgtcagaaatcatgtggtcttactgtatgttaaaactatatgattacatttttttctacagtaataactgcccccaaccttgtaaaatcctggagattatggccctcttagctcttcttagaactgttaaaaatgccaataggttatctttgacaaatagtcactgtaaatttagatttatatttagtatatcttgagtttatcttctgaattgtaataccgtcttttacttcgaatatagatacatgtgttcattcgtttattcatttatccatattcttacttattcaacctctgcttcattccagaaacaattcagggaaatattaattacttaaaatgatttgtcttttaccaaagacattttctattatcagttaaagtcatgagaggtgtaatccttttacaatattgaatcatattatccacagttctaaggtctttctagaactcaagtgcttgttaaaaattcacattgccaaatttctctcccctttccttccctgagcagacatttttttcccttattgtcatagatcccatgggtaatagaaattggacatttaagcagtggaattgtatacatgtcattagccacactttaaaacccaagaaatacaaatataccttttattccatttactgtgtgcattcccttggttttcttccttgctttagaatcaaggtgactatgacatggagatgcttgctaataggttggctctgccttcctacccaattcttacctatggcagcgacacctctgatagcctcctcttctttctccttagctatcccaagctccagtgtcctcccttcggctcccagagatgtggtccctgtcttggtttccagccgatttgtccgtctcagctggcgcccacctgcagaagcgaaagggaacattcaaactttcacggtctttttctccagagaaggtgacaacaggtaggtgatgctaccaataaaattcagcttaatcggtcatctctttaagtcaatacggttgggtaatggcaggaggagatcttgggcaggaactttggagaggctgtgaaatctctactatgtccttcactcattccccagtggagatgtgcacttttaaaaagcagtgttgttgacacagtctaatgaaattatctgtataaaaaatccttgaaaaaggtaagaatatattatgtcaattttttatttctttggttttcagagtcataaacagagaacagaattaggctgtatattagtagaacagtgtataaaagcactactgtggctagcttgtaatcccatttctgtcattgacatcacatgagctccaaaaaaccacatgacttctctgagcctcattttcctctttaataaggagaaattaataatacctaccttaaaatatacaataaagtgtataattggattgtttgtaatgcaaaagacaaatgcttgaggtgatggatgccccatttaccctgatgtgattatgacacattgcatgcctgtatcaaaatacatcatgtatcccataaatatgtacatctattatgtccccacgaaaattaaaagttttttaaaaacaaaaaaaatcaaatttaaaaaaataatacttaccttgcaaggctttggctagcattaaattaagttgcatatataaatgtcatatcagtgtccagtacttggtagaagttgttattgtggatattactattgactaagcaaaagtgagctgtacatatctggtttcaagattacaatccattgcatttttttctcaacattttccccttaagatatttcaccatcttatgactttgaaatttgatgtttaagtctgaggtaaatgctggataagttccacttcaggagaagcagggattcatgtcctagggttctagtccctcaaatttgtgagtgctgtaaacatgtgatgatctttagaattcaaaaggggacatatacattggataaaccaaagtgttatttagttcaaaatgggacagtctggtgctcaggtggtgcagtacagctcctcacctgctgggtctcaaaatgctctcctttgtagttggcagcaagttcaagtttagccttttaaagtttctgttatcttttacaaattgaccttactttaaaatgaaaggaaagaggctgggcaaggtgactccacgcctgtaatcccagcactttggcaggctaagtcaggtggctcacctgaggtcaggagttcaagaccagcctgaccaacatggtgaaaccctgtctcttctaaaaatacaaaaaattagctgggcatggtggcgcgcacctgtcatcctagccactcaggaggatgaggcaggagaattgcttgatcacgggaagcggaggttgaagtgagccaagattgtgccactgcactccagcctgggcaacagagacgccatctcaaaaaaaaaaaaaaaaaaaaaaagaagaagatgtaggcatacccatattgccttgtgctcactaagattattcattactgtgaagaaacaggcgttcgttttagtgttatctctgtaactatttgtgatcttacgatgcctcctgagttccttggatttcagtgtgtgcagctgtgaaaactggaagcaatgattcttgcccagtcatcatgtttttacatggatttcctggaggtaccttaaattcaacctgcccaaaacatactcactttctcctccttatgtatatttttcctttcttttcttagtttatgttagtatcttccatccccgttgaccaagcaaaaaattcatgccatgttttactgactgctgcctcccaacactaccattcctcgtgaagtcttgtcaactttaccttggccatagctcagccatgcttcctttattctattattttcaacatctttacctgatctctgggaatcgctcctcacctgccaatccatcttcctcactgtttgtagttacctttttgaaatatagttttgatcactcactccactgccccaaaatgtgactggttcttaaatacaataaaactgctatacaaatatatgcacatggaacttcagacttctttcaatggaagtctagccccaatctatctgtatctatatctgtctatctgtatgcatatatgtaaaagtgtggtttctataatctataatggttaaaattttttcactcaagtcacaagagctagatttgaaaatggtcctactatttatcaaatgtgtgatgcttctgtatttaataatgtattaaatacgaataatacttttttggtaaaaggaataaaaggaagataaattctacctgttagcattgctatgaggactgagggaattcaggtaaagaattcagggcagtcactccacacaggaagaatggaagggctcagaatagtgtgagctcagagacaatgtggaaaagaagttgaaatttaggctcaaagtataggaagaaggaggatgaggaagagaaagggaaggagaaggggaaggagaaattgttgaaattgctatgtttgggtgaaccatttattttcataattgttcacaggcctgcttatcatacaattttgtcctttcctcttctcttgagcttgttcttacctttcaatcctaagcatcaatcctctatacccccttggctacttgctgccatggttataccgtgaaccttgacaacaccaatcactgcaacctctcattatctgagtttcaaatcatattgttgcctcactctccagactcttgtcttactatcctttatttaggactctgaacacaacgaaactttgatttcatagagatctgcaatctgttgatcctatcccttatcgttcctgttttccttcacttattccatagctacagttccatggccagtaaacacagcaattaaatatttgctgacttgcatcaacgttttgcctgctactctcatttcatattacttgcttagcaaaaaccaactcaagtaaatgtaactttctacctactctttacttgtgctcttgtagctgaatatagctagatgaaaaggtgtaactgggctgattcgtctcactttgaattcatagctactaatctcctgttgcccattaatgctactggcaattatactacatttatcaggcagtctctctcacatacgctcctaatgatatttcatgactttttctctcttctcaaatctccaacaccttccgcctttcccccactcttagctgaccttgattttaatttcatgtaatataagaaggggaattctacatactttcatatgtgacttttttttcacccaagtttgtcttaaagcgtataatctgtctttcctcaaatttccataaaacaactgcctgtactctttaaagcgaaactttcacttgtgcacaagatcccatcttttcttataaaagagcaaatcttcagccattctttctctcttctgtgccatcagtttctcccactaaggtgaattacacctatcagcatgtcagcatgtagtcgaatcttccattgcaacaaattttgcttcaatttcacttttctctcctctaccactccatgctctgttctctttcataggaatattccttgaattgtctaacttcactccaatgtcttacatcatattccaataattattttgttcctagaatgtaatagcaactgctcttatcaaggttcaccaataacctcctgttgctaacccagtagtcaattcctggtcttcacattacttggacaatcagcaaattttgtcacatttgatcatttctccttcggtgaaactcattcactcagtttcctattgcacatgctctcctcattctactctggctactcattttcaggctctttttactttttactcccaatttatctgatctgcacatatcaaattgcttcaggactcaagcctttcattcacttcttgactttatattctgtgaacatgctgatgtgttccaaatttgtatctctggtcctaacttttttacctgcaatccatactcatatacacgtcttcctacttgatttctcaacatcaatatcccacgagcatctaaaacttatgaataaaaccaaatacctgttatgcttcaaccccaattcctccccaccaaatacttcatcattccagagttccccccacttttgaaatcttcatatttctcattatcaggccaaaatctttgaaataattcatagctcgtagttaatttttaattcttattatgaaatccgtcatcaactcttggcagtaccatcaaaatatatcctgaatccatgaaatagtataccaggttttgttataaaataatattggaaggctggttatgattttatattctgagctgagttatggaaataaagtatttcatcatattattctgcctagttttatattgtttaaattttcataataaacaattaaaatcaaataaataaaaacaaaacatggccaggcatggtggctcacgcctgtaatcccagcactttgggaggccgaggtgagtggatcatttgaggtcaagagttcgagaccagcccggccaacataatgaaaccccgtttccactaaacatacaaaaattagctggatgtggtggcacgcacctgtaatcctggctacttagaatggtgaggcaggggaattgcgtgaacctgggaggtggagatggcagcgagccgagatcgtgatactgcactccagcttgggtgacaaagcaagactctgcctcaaaaaaaaaaaaaaaaaaaattaagaccagaaacaaaatatatactgagtcctaccacttcttacccgcttcttaagtacaaccaagtctcattggaactactgcagtaatctcctaattctagtcttaccatagcagctggagtaaaccttttaaaagataagttagggtatgtcattcctctgcttcaaaaccctgtgatgactgtttttctcattcacagaattaacagaagtccttgcctttttctcatgttacttctctaacctcatcacgtagcactttccttatgtttcctaaatatccaagaatcttcctctattgagatctttgcgcttgctcttcagtctgcctaggatgttcttctcctcagagatccacatggatcattccctaatttctaccaaatctttgctgtaatgtcacgttctcatggaagcctttcttgatccctggcactcactatgtactttttatttttatttttctccatagcctttattaccttgtacttacaaattttgtttccctaatcccctttctcctcaccagaatataatattcctatgggcaaggctgtttttatcttctttatccactgagctattctcagcacctggaacagtgcttagcacattatagacactcactaaatatttttcgacttgatgccttagctgaaatgtcaactactgtgtggaactctccatagtcctccaactcagaattcatcaatttcacctttatctcaccccttcattttgattacattactgttatggccttggccaccttttatcaagtttgatgtttggctgagtacgtgtgtatttctttccctgatgattaagactagatcttattcataatttcatgctcaagtgtccagtatcatgcctcatgtaaacataaactgatcagaactgatatggtagaggtggcagagagatatgatattctcgatagatttttttcttacccagtaaaataaattgtgttactgaggaggatgaataagctgactacagttcaataaaaactttaattccaaaaaaagttgatattaaaattttattctaatatctccatttactttgatttttctggctttcaactagagccataaaatatgccactgtctctgagcagttagctgtgatgtttgtttgttcatgtaggtttatttagctgcttgacacaatacctttctaaaacgttgtgaatttaacatttatctcagattagcaataactttgtcaggaaagttattctagctcagatcatcacgaatctttctgacttgttaatggtgtagataatgcaagtgccataattcaaatctttttatccaaccccttggggtgcttttatttcataagttaaagagcagcatatattccaaaacatgaaagctagaattcacagtgaagtaattgcctcatagatatctagctatcccctcttagtacctaaaaatcattaggaatgaaaagtgatctttgagatcatagtctaacttcctgctacctaaacattcagagaccaatgatcagaggaaagtccatgcccaaggccacagttttatcatcaacagtgacagcaagcatttattgggcacttactctgccagatactaggctaagcatcttacataaagtatgtttaccaagatgagacttaaagaagaagtttatacctccattatacagctagtaagtagtagaactagaatttcgtgcagaccatagtccaaagcaggcactctcaatccctttttcatcttgcttccttagtggattaacctgcaagagaactaaatgttcttgatatttatagaattatgacatgcaattcttttatatgtttcattccaataattttttgacttaatggctaagttgatttgcattatttatttaccactaataaaacacactagtgaatttttattgttgtatttattttgagagatgaggtcttgctatgttgctcaggatagagtgcagtggtgtgatcatagttgacttgcagcctcaaactcctgggctcaatggatccttccacctcagcctcctgagtagctaggactacaggtgcatgccgccatgtctggctaagtttttgtattttatatatataaaaagaacattatacctctcacttgtaactaaaatgacttatgaagtataacacagtatagccaaaagggtaaggctatgtggctgtggaattgaaccacctgggttcaaatcctggcttgttattttaccatctgtgtgactttgggccaattactagtgactttgttttctcacatggaataataatagtatctgatgtgtaaggttgtgatgagtattacatgaagttaaataaaagcacctaaaacacttgctctttggtgcacccacaacattccattcttattagctaatgccatgtgcaaatcatcatgtgggttgaaaattaaaataactgaaatacaagggtgtttcttaactcttatttagagaggactttattactttcataagcattcacacatttgatcctcagataaggtatttatgatgatctccatttcacaaatgagtatgcctttctctgttcagaaagactgaaaaatattgctaagaaaccacactaatagtaaatattagaactgggatttcaatgcaaggtttctagtccagtgatctcttcactgtgccatacaaagtgaaatacattttctgaaaaagctccatataaaatacagtgggagtgcagatgagagaattaaaacaattttatgagcatcattcaatttaatcctcacaataatactgtgaggtaggcagataagggactggtatcttcattttgcaaatgaagcagagaaggctccaagatagcccctgacttgctcaaggtcacacactgttttgtggcagaacaaaggctgaactaggtgttccaacttgcagcaatatatgcttcacattgctttatgctgcctcagaaaacctctgctcactgttcaggattagaaaccagctttttctgactgacatggaggattccttttagaattcatggtatattacatttttgatgtggtgtttacatattctttccccgctcttcagagttgaggactctgcagctgatggagcttgttatccatgagggagcatattgtgatggaaaaagaacaagactcagaatcctaagcatgacattctggccctggcttaaagcttggcaaagttagccttcttcttagagccccactctgcttctctgtaaaatataaaatcatggccctgtacctcaaagtgtttttaattcattgaatgagagaataatgattttatttctccagtggacttaatgcatattgaaaaatgaaacatgccatccacaaatgtcatatataaatgagcaaatattgaatgtgagttgactatatgtccatgtccagcagtgtattgaaaatagaagagaacccagcagattctctggaaggagttaatcttgaaaggttcgtcttactgatgaatgtataaccacacacttagttaagagctttagtggaaaggaacatgcttctgtgagagcatttatgaaatgtgtgcatgatgtctatgtcataatcagacttgcagtttcaaaagatgactatgactagaaagtggaaactagagcagaggtcagccaggtgggtgccagagtcattcagcaggctattgcagaagtccaaacaaaagatggtagcttggtctaagggtatgtcagtggagatggagcagcagagagaactttgtagatatttagggggcaaaactgacaggactgaataatgcattgcacatgaatggtgagggagtaggggttgtcaaggacagtcacttggtttctggtatattccagtgtagagatcattgtgcaatttgctgagattaggatgctggaaaggtccatatttgaaatgaagatcataaattcagtttcagacaagttgtgcttgacatacctttacgaccttcaaatgggaatgtccccaagggccgtggaaataggaatctggagctcaaaggagaggattgggacagagatatgtatcaggaatgtgtcagcatgtggatgctcgctacagctagagaaggttaagatggcccatcccaagaaaacagaatgataaaagaatccagaactcagtcacatttatcatgtggatagacgctgaaactaaacaaaataagaatttgaaatcaaaatctgtttcaccccaactcccaagatatagctcattatttgcagttacagtagctatttgttacgtaactagtctcaagtgtgtattagatgttgaagcagagattacaggaaagcacatttttaaaaagctcattcctagatttatcctttttaacaattcaataaaaaacaatttttaaccaaaacttagtggaaatacctctaaccaagagaggtaaacaaaaaagagacatttccagtcttcattatgcttttatctggcagtgaaacatcttgaaacctttctctctaagatagcattgatttccaaacctatggttttagggtaataaggaatgtgacatttgggtggttatcactctgctatcactttgagtcctatttcattaaacaccatgtttcagttttgaaatcttttaattgttataacattctggcattcactaaagaaataatgaatgaaagtagaagagataaaaaggagatgctaaaaatctttccactaagaataacgtaactccttctctacaaaggaaggttaatgtaactcttcctccctgaagcaactaattaggtgtttgacccctcaaggcagcatttgttgctcaactcacaagttgtaactaaatgttaacactctgaggcacttaggcaagatgatatgtatttactaaaaatgcatgttagagacttgctacaaataatccactaagaagcagaatcatgtttaatctctaaactctacttctgaaatgtaaaaatagaagtgctgaattcagctaacacaaacacttgtagatataggagattttctattttttattcctaatgaagagtattagagtagtgaggtttctttaagtagatcccactctccattacggataatgaaatcaagacccaggaaggtgaagtgacatgccaaagatgaccgaaataaatggggatggaacaaggaatagaatccaattttctaggcatttctaaggtcacattatgtggagattttatgtaattattctcttttaatttcacatttatttatgcatttatttaaaaaattatgagccccagcaatgtagccatttttttatgctcagtgaatctatatgctaagtgtgaataaaatataaatggaatatggcttctctttttaaataatttacagtgaagtcaaagaaacatgcatgtccattaatacaaagtgatacgtaatacactagatgtataaacagaaagcaatgaaaacacaaaagagagcatttaatggtactgggtttgaagacatgagggtacgaagtttcagctaaacatttcctttgaattggattccaattgggtttcatttgaaacaagcttttgccaaacagagtcagaaatgtgagtcaggagaaggtaactccaggctcatcatcactggtcattgagaaatgcaaatcaaatcaaaaccaaaataagataccatctcatgccagttagaatggcgattattaaaaagtcaggaaacaacagatattggagaggatatggagaaataagaatacttttacactgttggtgggagtgtaaattagttcagccattgtggaagacggtgtagcgattcctcgaggatctacaaccagaaataccatttgacccagcaatcccattactgggtatatacccaaaggattataaatcattctactataaagacacatgcacacgtgtgtttattgcggcactgttcacaatagcaaagacttggaaccaacccaaatgcccatcagtgatagactggaaaaagaaaatgtggcacatatacaccatggaaaaccatgcagccataaaaaagggatgagttcatgtcctttgcagggacatggatgaagctggaaaccatcattctcagcaaactaatacaagaacagaagaccaaacaccacatgttcttacttacaactgggagttgaacaatgagagcacatggacacagggaggggaacatcacacactggggtctgtctgggggcgggcgggggggctaggggagggatagtattaggagaaatacctaatgtagatgacaggttgatgggtgcagcaaaccaccatggcacatgtatacctatgtaacaaacctacacgttctgcacatgtatcccagaacttaaagtgtaataaaaagaaatgaaaggaaaaggaaaagcaaaataagaaaagacagagaagctgacatgaacataggggtcctggggcaggacggctcattgcagatgactgtgcaaagctttgggccacatcgtgaaggtctttgaaccttgttccatggaggtgagatctcattaatctagaatggcagctagcacaaggttgtgggcatggagttgacaggttatgtgtgttaaaagggtatctttgtcaatagatgatagcaaaaattgagaagactaatggcaaaatgctagaaaaagctattattataatgcaatacatttaagtaccaactaaatcagggaccagttctaggcacaggagaatatactctaccagaattagatctcaatgtaaattgcacaatggtgcatcgcatgttgccatgcttgacttcatgcttcaaaagatgtcagtgcttaagagttacagggactgatctcagtaaagcaggaacattatggttagtgggtcaaactgcatgcttttagagtagaaacatttattttccaagacactttaatcaagtaactcaaagttcttaaaactagcattcacaaaaaattaacgcttcttattaactaactcttcttatagcctccttgtaaaagtccaagtggacaagttgtctacagactttttagcatgaggaatcagacttcgtatatttgatgctctatgtgaattttcattgagtaaatttgctgtgaatggattcaggcaggcacaagtggcttgattcctttacttcaatcgacttatcctgaatttggcttaactcccccacactgccaacttagagttagggggaaaggaatgaagtggagaagatttgtctgacaatccatctggtgttacagatcatgactctgagttctgcatatttgaagggtaattatgtcttcagattcacaggagagaacatcactgagagggaggaggcttggggtccctgccgcttccacaggagttgttaacgcagtgagaggccgaacaatacaagtttacccaaaaattgggtaaacttctcattattcactgttctcttttcttcagaacccagtgtgcttatctgcccatttacagaggggtatggactacagtgagcagagaggaaatccttaattactgcttcatggaaaatttactttaggtggctagtgttggcctatagtggaaccagagaaatcccacataataaactgcccttccaaactcagatgttacttagttgttgggaaatggtttgctatattttgtttacagctattaaagcctggaaagggtgattaaaaactcgtgggaatccttggggctagaactgaacaaatctgtgaaggataacatggcaggaaataccattttctcaatatgcttttgtataatgttagcaattagatgtcaccccattaaaacacagggaagccacgcagcagtttggcagcagacactcatccaccagtggggacatcagataccataagactatcaagctgtactgtggaactcagggaactcctatttcttctcagtgtccctcagagagcagtttccagccctttaaaaatgaatattttcattattggaacttgttcaatgtgtgtagttatgctcactctttttgttttgatttatctttgcaaagaaaattaatatgatagaaaatatcaataaagattttttttggagtgggggcaagccccaatgtcagggaaacctatctatgtagcttttttctatgtgattatatctctcattaagttatgtcctcagattcctggttttaaatactttgtggaaaagtccccttcttggacgcaatagatttatttcttatgaagttgtggtggtattttgttattataaaataatagcagtgactgccattatggcagaatccatattaagtatcaggtgccatgtatttttctttagatattttacctacagcatttcatttaattctttcagacattgtgatacaaaatttttatagcacatatgttgtacttgagaaatctggggctcagaaagtttaatgtgaaggccagaaacagcccccctgacttacctcagtcctgaactacttactccacagtctacataggcttttgaggtttgttttttgttgttgttgtttgtttgtttatttaaaacaaggtcttactctgtcacccaagctggagtgtaatggcatgatctcagctcatggcaacttctgcctccaggctcaagtgattctcgtgcctcagccactagagtagctagaattacaggctcatgccaccatgcccggctaatttttgtatttttactagagagagggtttcaccagattggccaggctggtctcgaactcctgacctcaagtgatctgcctgcctcggcctcccaaagtgctgggattacaggtgtgagccactgtgcctggcctacatagtgtttagatgcaaactccctttgatatgataagcagatttctggaaagtggcacataaaattgaaatggttagattaaaccatggtttaaaaccactacgagcccacattgtggaaaccagtgatcaacccagggcagaaccagcaggtgatcagaggttgaaccatagagttgtcttggaggtgtatttacatagcaagcacaatgcatttgcctgggttctattttacagatcaaaatcatggaaacattttcaaaagatgctttatttatactttatgtaagactgagaaagtatgaattgtccatatcaatgaatatgtttatacataaattttttatgaattattaattttggataatttttggaggctaatgaagattattaaatcttccccattatgaaatccaacatcctcttgtatatgtaagtgatattttcatttcatgatcttggacatttttacctggacatgtccagattttcttgcgtccctttcctttaaagtatacctgttcagcaaaagacataaacagatacttctcaaaagaacacatacaaacagcaaacatatgaaaaaactgctcaacatcactaatcgtcagaaatgcaaatcaaaaccaaaatgaaataccattccacatcagtcagaatggctattactaaaaaaaaaaaaataataaacaatagatgctggtgaggctgcagagaaaagggaatgcttatacattgttggcagaaatgtaaatttattattttaggcactatggaaagcaattaggagattcctgaaagaacttaaaacagatccacaatttagcccagcaatcctattaactggtatatatccaaaataaattaaataattctaacaaaaacatccatgcactcatatattctggataaagaaaatatggtgcatatacaccatggaatactatgcagccttaacaaggaatgaaatcactccctttgcagcaacacggatgtagttggaggccataatcctaaataaattaatgcaggaacagaaaaccaaatactacatgttctcacttataagtaagagcttaacactgagtactcagggacatatagatggcaacagtagacatgggactgtcacataggaggaaggcaggagggcaagggttgaaaaactgttgcgtactatacttactacctggtcatgacaagatcaatcatacctcaaaccacagcatcacacaatatacccgtgtaacacattttcacatgtaccccagaatctaaaataatgaaattatttaaaaaataaaatacagaataatacctgttcaaagggttatggccagcgtgacttggaacacagttatttcatccaatttatttagtatttgtaagaataaagtcaattatgaaagctgtccttccttatagatacccaaggtgtttgataggcaaatatggcctttgataacaatgttgcttgaaggtctagaaaagatgctttgaaatgattcacagcagatgatagacaaattgatcctctcagcagtctctgagtgctcattgtcccctttttccctataggacctcatgtcttttacccaaagttcccatgatccaaagaagttccttatttttccactattgttgaatgatatcaatactagatttagaggaggaagttccagatttcattcttaagtgtgatacccactaactgtgaagcctttgaataaatcatgttgcttttctaaatctcactttctatatgtaaaataatgataacaaaaccaccctatctatatcagtaaggtacctgaggcactgggtataaaaattcttctgctaaaacaaaaataagcaaaaatccccatctccatgtgctcaatctctttgagctatatacaacaaggcatacaattctattatgagggtttgcttttaaaaagcaatttgctgacctaaatgatcttagtttggtagaatatagcagtgtggtatgtggcaaatgggagcattgttccatatttcttagccttacctactttagattactattgaatctcatccagacccctactctcctagaagtcggaattcagccttccagaaacttcatactgcacttctaaaagaatgcctaaacctcaggctatatccagattcatacagggtgctttttctctattgtggtaaaacatatctttcattttacaattttaactatttttgagtgtacagttctatggtattagcacatgtaccttgttgtgctaccatcaccaccatctgtccacagaatttttcattgtctccagttaaaattaaaaaaggcaggggttgcaatcctactctctgataaaacagactttaaaccaacaaagatcaaaagagacaaagaaggtcattacataatggtaaaggcatcaattcaacaagaagagctaactatcctaaatatatatgcacccaatacaggagcaccaagattcataaagcaagtcctgagtgacctacaaacagacttagactcccacacattaataatgggagactttaacaccccactgtcaacattagacagatcaacgagacagaaagtcaacaaggatacccaggaattgaactcagctctgcaccaagcagacctaatagacatctacagaactctccaccccaaatcaacagaatatacatttttttcagcaccacaccacacctattccaaaattgaccacatacttggaagtaaagctctcctcagcaaatgtaaaagaacagaaattataacaaactatctctcagaccacagtgcaatcaaactagaactcaggattaagaatctcactcaaaaccgctcaactacatggaaactgaacaacctgctcctgaatgactactgggtacataacgaaatgaaggcagaaataaagatgttctttgaaaccaacgagaacaaggacacaacataccagaatctctgggacgcattcaaagcagtgtgtagagggaaatttacagcactaaatgcccacaagagaaagcaggaaagatccaaaattgacaccctaacatcacaattaaaagaactagaaaagcaagagcaaacacattcaaaagctagcagaaggcaagaaataactaaaatcagagcagaattgaaggaaatagagacacaaaaaacccttcaaaaaattaatccaggagctggttttttgaaaggatcaaccaaactgatagaccgctagcaagactaataaagaaaaaaagagagaagaatcaaatagacacaataaaaaatgataaaggggatatcaccaccgatcccacagaaatacaaactaccatcagagaatactacaaacacctctacacaaataaactagaaaatctagaagaaatggataaattccttgacacatacactctcccaagactaaaccaggaagaagttgaatctctgaatagaccaataacaggatctgaaattgtggcaataatcaatagcttaccaaccaaaaagagtccaggaccagatggattcacagccgaattctaccagaggtacaaggaggaactggtaccattccttctgaaactattccaatcaatagaaaaagagggaatcctccctaactctttttacgaggccagcatcattctgataccaaagccaggcagagacacaacaaaaaaagagaattttagaccaatatccttgatgaacattgatgcaaaaatcctcagtaaaatactggcaaaacgaatccatcagcacatcaaaaagcttattcaccatgatcaagtgggcttcatccctgggatgcaaggctggttcaatatacgcaaatcaataaatgtaatccagcatataaacagagccaaagacaaaaaccacatgattatctcaatagatgcagaaaaagcctttgacaaaattcaagaacccttcatgctaaaaactctcaataaattaggtattgatgggacatatttccaaataataagagctatctatgacaaacccacagccaatatcatactgaatgggcaaaaactggaaacattccctttgaaaactggcacaagacagggatgccctctctcaccactcctattcaacatagtgttggaagttctggccagggcaattaggcaggagaaggaaataaaaggtattcaattaggaaaagaggaagtcaaattgtccctgtttgcagacgacatgattgtatatctagaaaaccccatcgtctcaacccaaaatctccttaagctgataagcaacttcagcaaagtctcagcatacaaaatcaatgtacaaaaatcacaagcattcttatacaccaacaacagacaaacagagagccaaatcatgagtgaactcccattcacaattgcttcaaagagaataaaatacctaggaatccaacttacaagggatgtgaaggacctcttcaaggagaactacaaaccactgctcaatgaaatcaaagaggatacaaacaaatggaagaacattccatgctcatgggtaggaggaatcaatatcgtgaaaatggccatactgcccaaggtaatttacagattcaatgccatccccatcaagctaccaatgcctttcttcacagaattggaaaaaactactttaaagttcatatggaaccaaaaaagagcctgcattgccaagtgaatcctaagccaaaagaacaaagctggaggtatcacactacctgacttcaaactataccacaaggctacagtaaccaaaacagcatggtactggtaccaaaacagagatatagatcaatggaacagaacagagccctcagaaataacgtcgcatatctacaactatctgatctttgacaaacctgagaaaaacaagcaatggggaaaggattccctatttaataaatggtgctgggaaaactggctagccatatgtagaaagctgaaactggatcccttccttacaccttatacaaaaatcaattcaagatggattaaagacttaaatgttagacctaaaaccataaaaaccctagaagaaaacctaggcattaccattcaggacataggcatgggcaaggacttcatgtctaaaacaccaaaagcaatggcaacaaaagccaaaattgacaaatgggatctaattaaactaaagagcttctgcacagcaaaagaaactaccatcagagtgaacaggcaacctacaaaatgggagaaaattttcacaacctactcatctgacaaagggctaatatccagtatctacaatgaactcaaacaaatttacaagaaaaaaacaaacaaccccatcaaaaagtgggcaaaggacatgaacagacacttctcaaaagaagacatttatgcagccaaaaaacacatgaaaaaatgctcatcatcactggtcatcagggaaatgcaaatcaaaaccacaatgagataccatctcacaccagttagaatggcaatcactaaaaagtcaggaaacaacaggtgctggagaggatgtggagaaataggaacacttttacactgttgctgggactgtaaactagttcaaccattgtggaagtcagtgtggcgattcctcagggatctagaactggaaataccatttgacccagccatcccattactgggtatatacccaaaggactataaatcattctgctataaagacacatgcacacgtatgtttattgcggcattattcacaatagcaaagacttggaaccaacccaaatgtccaacaatgatagactggattaagaaaatgtggcacatatacaccatggaatactatgcggccataaaaaatgatgagttcatgtcctttgtagggacatggatgaaattggcaatcatcattctcagtaaactatcgcaagaacaaaaaaccaaacaccgcatattctcactcataggtgggaattgaacaatgagatcacatggacacaggaaggggaatatcacactctggggactgttgtggggtggggggagcgggggagggatagcactgggagatatacctaatgctagatgacgagttagtgggtgcagtgcaccagcatggcacatgtatacatatgtaactaacctgcacaatgtgcacatgtaccctaaaacttaaagtataataaaaaaaaagaaaaaaattatttacttattaaacactaacgtcccattctcccatcacttagctcctggcagccactcagggtgcatattttaaatactagcagtgctagttaaaatgatgctaacccgtataacaaataagccctaaaatatataatggctcagaactatttctgactctataaggtatggaagggatgttactgattgtcagttcttttcccagctcttctctagaattattacaaatgttgattgttccatcatcacccatatggcttctaaggtcatcatgcttccctacctcaagacaacaggtggaagaagagaacatggtgaattacccatgtgcagtttattttaggccaggcctggaatcagcacacatcacatcacatacactcaacctcttgatgagactcagtcacaaggcctcaactagacttcagggaagccggaaaatacggtctagtacatgaagcagaaatttcgggtttgaggataagcgagccagtctctgccatcagtcatattaagagtgtagatatgcccaggaatcatcatcattcatgcacttagaacttttactttttgaaaatctaattttccctggcagaaaaagatattttattttaaatatgtccaaaaccaaaacatatctgaatggcaaaattaaagtgtacgtataattccactgagaagcaagagatattatctagatatagaaaccttgagaaacaattgagaatcttagaggaagtgccttcttcactcagttcaatcagctatatgttaagttccaatgaggatatctagaatgttcagaaggtgtagaattatgtgtgtccttaaagaatatttcaatagttaccatttctaaaatgtcagcatccatatccaaacggtttgtcatctcttaatacgcactataaatgcaaccatgatcagtagattaattcattagtttgcaacactgaggaagtttttagtttataaatgtattgatattgaacacatagagatgtggcttgaagagcaagacaaacaggcatatgttacagtttctcttcacgcaggaaggaatctacttcctttcactaattgcacttaaagtaaccacagggactcaggctccatacatagaacactaagcatctgcgttttcctttcatacaatgagagaaaatgcataaatgcatttgttggcaatactgacaaagaccgatttgtggaataattgaaaccttgatttctgtcattagccggatgtttacaaaactcgtcttcctgtctacattccagatgtttctccttattttaatagctccttgtttttcatgggttttgaattccaaattgtaaagtgtcgaggaaaaagactttcgtttgcaagtttcatggaaaatgacataatcttaaactccccagaatccttgcaacatttatttgtaggtccttccaattagtttattttctatagaaagtctgaggtcttgaattatgtcccagagtcaacattagatgagtgagcaaccttttggttcacctcactactcttgcacatcaaatacagattttggctgaaggtattctttttggaataatctttctctgcaactttgatttctcagggaacgagcattgaatacaacacagcctgggtcccttcagctcactgtgggaaacctgaagccagaagccatgtacacctttcgagttgtggcttacaatgaatggggaccgggagagagttctcaacccatcaaggtggccacacagcctgagtgtgagtatgaaaaggaacgggccacatttaaaaagtatttattttcctctgcaatatccttgaattctttcacagaacctttgcgaagtgacaaaagcgaagaagagttttttttcttctaagtaaacttatataactcgaggacttttaaaagataacttgtaaatagaatggcctcttcacttaggccacataccgtaatggcaaattaacctctataaaggcctaatctatctatgcagtctacttattcatttcctaagaaagtgatttactcttcctgacagtattttatcctcatcattgagtttcagcctcctctgttgaattttcagattttttgagtttgtaaagagtgtaacatcaaaggtaaaagaacaataacatacaatttctaaatccagggactaatttaaaagcttgaacacgcaccgcatgcactgaaaaacctactaaaagcaaattgagatttgaggaatatgagagataacctctattggataatctcactccctctaccttgaatcactagattcagctatgtttttttttcacaaagtagagcagctgaatgttctttgaccaacgtataattcaatgatttcaactttgataaaggaagagctccagaattacatatcgaaaactatttctgtacttgacaaaattttgttttttcttgtgcatttctaatgttttttgaaaagattagttgctgatgagtcattcgccaaatttgttttgtttcgcattaaaaaacaattggaatttaaaatcaaaatgaaatgcatggctacttgttaacaagctgccttatgttaaacacctaactgtacctgtttcctttttatataacaaaatttgtaatgatattttgatttcctgttcattttacgtgaaactgtaaagaggtatatcaaaatcacctcttgtattttgggaataaggtgaagtagagattggaaatattttaactggtaattgtgagagagtaacctttgtattctatcacttcttgggtggtttaaatcagcaagtcgaagaagagagagcaggagatacagtctgagtgcactttccacagaatctccatcctttctttcatttggccagggctacagagacaagatgataacaaattggaataaagtattaattgaagggacggaagagggctaagttgtgcaagtactacaaatatttgcctcacagaaataaaaacctcaacaacttcaaaagcatagtcatgttgaggttccagacaattatttggaaatgcaggcccccaggcataataataatttgtaggacccaaataatttctgtttgcaaaataaaaacacaggggcacattgttaaaaattattaagattatgggatggctacagcagaacgtgagtccttgcacaacttcaccctttgctgcctatgagctggtcctgctcccaggtttctgttctgggcaatgttttgttgctgtactgatttaaatcactaaacaatgccaatttcctcttcataatgtctatattaacataacatttcaatcttctttttttatttttgggacggagtctcactctcttgcccagactggagtgcagtggcacaatcgcggctcattgcaacctccgcctccaaggttcaagcgattcccagctaatttttgtatttttagtagagacgagctttcaccattttggccaggctggtctcgaactcctgacctcaagtgatccccctgcctcggcctcccaatgtgctaggattacaggcaggagccatcgcgcccagcccaacatttgagtctcaattgctttattgactttctcttcatagatcatctatgtaaaatcaataacttttatgactattttatatttttgattaaaagcaaattaggttttacatatatataatacacacacactatatatggtatatctcatgtgatagataggtcaacaatttaaaaactcttgaaaaattccttaaagaaatccttgataaattttccagtattggaactagctttaaaagcatgctcattttcaaaagatcaaatctccatggattatctgaatttttcatctcctagttctaaaattatcgtaaaattgttatactgtacttttcagagctgactagtcatgattacattgcatttctgataaaaatcctggttggttagccttgctttgtaagaatgagcattttttttccccttgatcaatactattgtttctaagcattcaacttaagaaagcaattttcagtgttttaaaattttacttcttttttttttttttttaacaccaacgttcccaagccaagggacagtaaagtattttcgtttttgacactggctaagaacactcattccataaaaattaaaaaaaataaaaactatgataaaatgatacaatatattctgctattttaatataattaagttaaaaagaataatgatttttttgtatcacacatatggccttaactttgtaaaacacaaacaatgacataattcataagtatgtttaataaacatttattatgttcctaacactgttccaggctgcatgaggcatgttagaaaagcatatgtgagtaataaagcagcagtatttatggatctcagcagatttggggggaagcaggtattttaaatatgtaacaataacaaaacaactcgagtaggggaacttataagaagttggtaaatggaatacaaacaatctgagtcacagatttgctcgtgggcccatgacctgtgatggctgcagcatattacctagttaatttcttatgcccagatcatactgcatccacctcctcaaatcagtcttgtaatccagttacaatgacagccatgtctatgctttatatatcacacattccttcccattcagaaagcagtgtgaaaaatttgtgcagagcacctcactggacccaagtctctataagcatttactttgcttaacaattagcgtaaatgataaggcataaaataacaaaagcctaactgaataaaacatgctgattgttggtattgttgtcacatataaattctattctctaagaaatgaaaatgaagaatctctctgctttagaaacatgatgcagccatgaatctttttcattaatggcagcaataacagccttagaatgctaaccatattttggcctttagtaacagcattgttctattaaattacccattttcttaccagtatatggaataaggatacctttgcagatcattgtttatttgcactatgatttgattctgtttcactgaacattgccactggataattcctcccttactgagtagataagtagttaggaataaagtagcctgcataaacaagacattcagaatatcctttacatgtgcaagagagttagccaattgcttcaattcatgtatattgagtactactaaactcacttgccgtctttcttacggacattagaataaataaattatattatcatgagtgataggcattgcatgtgtattttatcttctgttggtaacataaaatgccattttggcaatttgaaagtatttctaggataaggagcacttacttcatcttctccaagcctgctcaataagacacccaattactgaagaagatggaatataccagagatcctatggttcctttcctttcctttcccattccttcctcccttcctccttcccgccatccttccctctttgttataagcccatctttctgtccttaagagaaaatgcgagggctggttttatgacttcgctagactatcagaatttagtggcaagatcaggttaaagaaaacgttttcatcaatatttcttttctgacaaaatgatcttatcttttgaaaatgggtctcagctgagtatgcatttggttgctgcttttatcaatgttttccaaatgtgatgtagtaattgtacactaaaattacatagcttgtatacaaattgaatttcaagtttttcatattatttgaaaatatcaactctattatacaaaccatatttgcaaagaataaaactgatggaaaatatgtctgaaatataaatcagccagcaactgtttctaaaagtgcatacattttgtagtaatcatttaaagagatcgacagcccaagatccagtttatgaaataattgctcgaaatagaaaggcttgatttatatgaaggtttgtgtcctctgatggtatcttcctttgctaaacccttgcccattctcccctgcctttatggtatgtaatttctctaccatattatcagccaggatttaagtccctgtctgcttaagacttgtctaatcttttcataccacatgtggagattttttgaattattatttgcagtcctttaagatcctgttaaggcggtttaatcataaaggatgttaaaatggaccacatactggcttgagggcttgagttagaatgggaagcctatttgcaagaccacaactcaattacctacaaaactcttttagatttaagagttgtaagtaatattcttagtctattatattctttacactaaaaagatgagtgaaagcaacccaccaatttgagtgactttagaatatattatctagaggaatagccatatttgcttctttcctccttcatgagattttaaaaattctaatatggctctacttgtatggttgttaggaaaagaacagagaagttcaaataatgtctctgaacattactacctgtatcctagagcaagtttgtcaatcatcgagacctcagtttcctgaactataaacgggagtatcatttattcctcttcttcctaagttgcaaaaatgaaatatgataacacgtgggcagccactgggtcttgcctggcatctcatttaaaaaaaaaaacaaaaactccctgatccaacgggatcaaataagaacataatttcaactgctctacatttacaaacaaagtgggatactcatcagggtaatcacttgggtaaataaggctaatataatacctcatttatagtttagaactagcttgatcactatacagtcagcacatttacatactctgctactttctccctaattaacctctccttagcatttggcaggctgttatagattgccttgtctaaattttgaagtcttatgaacagaaagtgctacattatcccgtaagatgtatcacagcattgccattttataaataaagccatgtgtcacttaaggaaggaaatacattccaagaaatgcatcattaattgtttcatttttctgagaacataatagtgtcttacacacctagaaggtagagcctactacacacctaggctctatggtatagtctactacacacctaggctatatggtatagtctactatacacctaggctatatggtatagcctattgctcctaggctgcaaacctgtatagcatgtgacggtactgaatactgcaggcaattataacacagtggtatatgtttgtacatctgagcatgtctaaacatagaaaaggtaatgcattgcattagaatgatatgatagcaagatgtcactaggcgatagaaatttttcaacttcattatattcttatgggaccaccttggtatatctgggctgttgctgatcaaaacattgttatgtgacacttggctgtcattggttggttgatgctggtagaatatggtttgggaaagatacaaaatatcagttatatttattaaagtatggttacataaattaagcaaactaagttgatcacagctctgtctagctcattacttttgtcacttgatttacaatgattaactgcactgcactgagatttgaataaatatttggggtgaccactatggcaaacctgtccactcgacaacaattcagttgtctgatcccgtacatggccagacataaataatggaaagaagtaaagataagcactggcattacatcttttttggtagcatacaaatacattattttaaaagtctctggatgtaaaaaaatgttttcgggtgttataaataagagatggggaacgttaaaaatttatggtttagtatcctctgtgaccaaaggcttaaggaattcatttagatttaatggtcaattaggctaggtatgatgtctttgataatgacatatattagtggaaggattacaggtgggcttgagatgatgggttgtttaatcacctctagaagacttcaaagcaaatgtgagtcactgtgttctttcttcattcatttaaaaatatttattttgtgctaagttctagacctacagtttccagtacagtaaccacaagccacattggtctatttaaatttaaaagtattgaaataaaataaaatttaaaattcagtttgtcagtcacaatagccctattccaacttcttagtagcacttaaaatttaaataaaattaaaaaccaaaaattcaacttatctctcttgtgagccacatctcacgaattcatatatgattactggctactgtattggagatcacagagaacatttccattatttcagaaagttctctcagacagtggcagtctaggcactatgctggtaaacgaggatacaaatgcaagtcagaaatggtcctaactttcaaggaactggtagtctagtggaaacaactttaaatagaattcactaaaaacagctttcacagatttcatctccctgaacaaaattgttcagttttgttcaaaacaaaaaagttaattatgtgctaaaataatagacatgattttttaaaggccacagaatctagacctgaagatatgctgtttatttacttaagttagttcatcacattaaaaatccattacttggaaaaatacataagcatcttccgaagttcaactgaaagtgaaggacatagcttactagttgcttgggttgaacagtggtatatcgtaagtgtaatttccctaagaagcttctgctggctctcttattttctcttttcttttgagcacacagtacgattcaggcttcttcagttggtataaccaaacatctagaaaatttatctgcttcatgagaaattgcatagaaagaaagctaacttctcatagatagacataagggagtgtaggaaaggggataagaaagtgtcataataattattggttttcaggcagcacggtcaactagtctaggagaaagaggttccctaagtagatctgatttgggtttaatcgcctagtttggttatatgccctactaaacgtgaaagcggttggtttgctaagctgaattagagcaaaagccagcatgaacatcttcggggatattgtcgtcatgctggtgcagctgaatgaaactctactccaaggacatgagctgagctgctttaggcaaccgctttgatggagagctgatgaacaccactgagaaagggtaaagatagaaaggaataaggcattttaatcacatgtgtattgaagcactccctcatctttagagcatatttttctatgcagttcaaaagtatttactgagcaccaactatgtatccagccttttataacatgcttgggatagaaaataaaataagggcagaagtttctttctttgtctgtttctgctgttataacaaaacacctgacactgtaatttataaaggatagaaatgtattgctcatggttctggagactgagaagtctgagattaagcaggtgtggtgtctagtgagtgctggtctctgcttccaagatgaggctttgttgctgtatcttccagagggtatgaacggtgtgtcctcacatggtggaagaagtggtaggacaaaaaagaggagctagctgttccctctagccctcttataaggactaatctcttcatgagggtagagccctcatggcctaatcatcttttaaaagattattataatatttgcattggggtttaaatttcaacatgaaattttggaggggacacaaacattcaaagaagtggaatcaaatttactttctctcttttttttttctttttttttttgagatggaatcttgcactcttgcccaggttggagtgcagtggtgtgatctcagctcactgcaacctccacgtcctgagttcgtgtgattctcctgcctcaacgtcccaagtggctgggattacaggctcacaccaccacacctggcaaagtttttgtatttttagtagagacggggtttcactatgttggccagactggtcttgaactcctgacctcattatctgtctgcctcggccccccaaagtgctgggattacaggagtgaaccaccgtgcctggctctatttcctttttttaacctaaagttagtgttacaaagtttcattgtgtaattaatgcataatctaacgcagatataatttgatgcacaaaccatattgccttttagtataaaatattttagtatattttagaaattatctgatctaacactccaccaaaattaagtaaaactcccttttaaattactgtactattttatggattcttttaactgcaggttatattctgcctgctgtaatatatggtgaattttacatgttacataaaaagtcaataatatgactttagctatttttctttaactccaatgttcttacattatgttactttaattgcccaatctttcctccttggggaacccaagatcccatgcaatgaggagttgagttgggacagaatttctgattacaggctattctgcagggagcggagattaccatgagttaaaatagaaagattttaagcctatgacaagcaattactgcttctaattgtagctgttaaagtcaaagctgagatggtgtcactcatttctggaaggaaatgaccacagatttgtatcaattgaaagtcaagcaatggaactctaagcccatggtcagtgctagtaacttgtacattgtcctcttatttaaacctataattggtgttataaattataactctgggtacccagagtctgacacatttcccggtgccctgaaacataattttaaatccatcaacactttaagatagtagattccaaccattgaaatgtgcaaccaataaacctggggaccagagcttttaaggctagccatagaatacgtcagtgcattagtgagagcccaaggcctatgtctagattcctaagtacaggcatgcttatcctaaacaatgggcttacaataatggcagtttctcttcctgaaatggaaatatcactttaaaaaataagcaaaagatctgtgttctagactgagatttatctgtattctgctgtttgtttttggggaagtcagttacctggtctgattctcaaatttttataaaataaggatcatactgcttgttttgggataatatgaaggggcactagaaaagcctcattaaggaacactgctaactgatcttacacaatttacctcaatttcattgatttttcaaatgtctcccttagaaataagtaagtgaacttgttaacccatttgggtgttgcattatttatctagggctaccttaacaaagtgccacaaacttggtgtctccaaacaacaaaatgtattttctgacctttctggagcctagaagtccgaaatcgaggtgtcagtagggctatatttcctctgaaaatgcttcagaaaaatccttccttgcctcttcctagcttctggtggcttctggcaatccttggcattccttggctggtagctgcataatttcagtctctgcctgcatctccacatggccttctcctctctgtgtctctgtgagtcctcttctcttcttataatatacttggaatgcaccaaaatccagtataaccttgtcttaactaattatatctgcaaagatatgtcatcaaataaggtcacattctgaggttctgggtgtacatgaatttttggagtactattcaacccgatatactgccctgtgaatcttagtaagaattcttacagattcttagtacgattcaatgtcatctgttggaggactgagcaaactatgaagtatatattatgtttgtatgtatttatgtgcatgtatatatatgtgtgtgtgtatatatgtgtatatgtgtagatatgtgtatatgtatatatgtgtgtgtatatatattcaggtcatagctgttaaaatcagagtccagatattggcattagtgtctggaagaaaaacattttagggattttatcaattgaaggtcaaacagtagaaatccaaacctgtggtcaatgttagtaagttttcacaggcagcttaaaacatagcaatgacaacacaattttatatatatataaacttttccatatatagtgtatatatatataattgtatatgtacatatagcatatatgtatacatatagaaaattaaagtgtatgtctatacaggtatatacatacattaattagcaagctatatttttcattttaaaaaccatttcagtcactgcctctcaagcaaagtagaaatgttggtattaacagacatccctagtgtccttaaaatcatatttgctatgctcttaccttcttcatctcttcagaattctaaccctgccttgtaagttgtaggacatagcactttctgaatattaaggactgcaaactgcttaggtggcctgaaggaaactaataagtgaatgaagttagccaaataacagattttgctgaaggtgcctgtgagatctgttacagacattgaccacatgcttggatttctactgtttgaccttcagttgataaaaacccctggttttcttccagacactgatgccaacaacaggactctgatttttattttattttattttgagacggagtttcactcttgttgaccaggctggagtgcaatggcacgatcctggcttactgtaacctccacctcccaggttcaagtgattctcctgcctcagcctcccgagtagctgggattacaggcatgcgccaccacgcccggctaattttgtatatttagcagacaccaggtttctccatgttggtcaggcaggtcttgaactcccgtcctcaggtgatccacccacctcagcctcccaaagtgctgggattacaggcatgagccgacatgtctggccaggactctgatttttaacacctgtggcctgaaacagtaattgtgtgccatcaccttaaaatctttcaacttcagaagaatagcaatactttgacctgtaaaatatcctgtaagcaagaattctggcccaacccaactcctacattagatatgacaaaattaaatgcaaaaaaactaatagtgtcagagccagagtttgaacctagcataatattcctactacactgctaactctgtgtgtgtgtgtgtgtgtgtgtgtacacaaactaagattagccatgatcgtttcaggaaaaatgatcaaacattaattaccttttgataacagttatttaatgagttaaaattcttattaattcaccattgataaaaattagttcagaaaacatagcagtgacaacataatatttttaaaatctcagcagggcgtagtggttcacgcctgtaatcccagcactttgggaggctgaggcgggtggatcacgaggtcaggagatggagactatcctggctaacacggtgaaaccccttctctactaaaaatacaaaaaactagcctagcatggtggcgggcgcctgtagtcccggctactggggaggccaaggcaggagaatggcgtgaacctgggaggcggaacttgcagtgagccgagatcgcgtcactgcactcttgcctgggagacagagcggactccgtcttaagaaacaaacaaacaaacaaacaaaaaatctcagctttggtgagattaagccagcctggatgaattatactaaccgtcatgccaacgaccatgctaggcacataatttctactatctgctataaatcacctatttgattttaactctcagttgaatttcttgattcaaagccctctcctatggccttgcagtgaaataaaaaataatgattactacttctattcttcagaggggttaattggcttgtagttcagtataagctcttcacaaaaatgttgaggactcccagaaatgagtagatgttaattttgatggtatggttcattatctaacatattatttaagagcaaaaacaatataataataaatttaacatatcacttacatttttatttatgccacagagtgtttaaattaaacagcttgattaatttttatcactttggatataatatgttttatattttctttataacctcatatttttatagtatttttgccaatcttcttaaaaatatttaattttgtagtattacaactaatttcacttatttttactttcaatgtgcctactagaaaatttaaattacgtgtatttgtagcttatattcatattggacagtgattgcttatatgtatattgcttgtgtcttatgtccagtcaaaaggaagtcaagaaggttgacaatctgaaattaaattgagttttcgagttaccaaaatacagtggttaaatttaactcttctcaaataactgtttctaaaagttatctaaataacattcatagttaactgttttccttattttactcagtgtttactcagcatgataacagctcttgagcatgagtcagtcattttttttttcctgttgatctggcactttgtgtcaccaatagaaataaaagcaaaagtggggttggctagagaaaggggaattgttgatccagagcagcacaccagggttcccgtattcagttttacctaaagtcattctccagcttctgtgagacgatttactgctgaagtctatttgtcttcctgctgctatctctgaacaagcccaaaccttccatgtggttaataaacttcttatcttttgaatactgaaaataaaataaacttaatcctcagggtggttcagtcagccgaccagaagcctttgagatgcttcttagagatacaggaaaactaggttttctgccctgtgtgattatcaatctttccattgcatgcatgtatgtggaagggcgttaaaggtgcttctcagtgataaatgtcagcgaaatcgcaaagtgaatattaatttcagtattgtcaaggtcagatgtgtacctgggttcattgttactggaatttttattgttgctgctattgggaaagatattttatcttgggctcattttttcaagtatggagaaagagtgagaaaaattcctcaatgtacatatacattgctcagaaaaaaagtactgtagcacagtctggtctgttaattagggaaattattttgagtccctaaaaaaagatcaaggtgtaagtttggaggagttaagctaggtgggaaacagagcaaacagatgatcacgagatctggagactagctggtcttcctgaaaagcagctgactatcaatcaatagaaaaagcagaaaattgaagaagaaataaagaagaaaatagtttgtgatgtgcccattaatagaagtagggtgtgaaattatctaactgggagcttataaattaaaagaagagaagataggggaagatgttaggttatgagtgttcatacaggaatgaataaccagctggacatctctgtatacagtgaactgcctcaaagccagtgtggtggcaaacctgtgaattcactcacccacacgtctccacctacacgcatgcccagtttagtctattccagtgtttcctttctcagtgaacaacaccagaatcacctagctatgcaaatctgtattgcaggagtcattcctgatgcttccatcaacttcactctcttaccaccaatccaagtcctgttgattttaccgtccctatagctcttaaatccctgcccttcttttcatctccatggccagccattattctaattcaagctgttttcctctctcttctggactatggaatattctaccaattgatatctcaacactcatctgtgccccttcaattcactgtctgtgtacagtagacaaagtgaaaaatgcttaaaatgggaatttctttctgatttttagaataaaagatccacatcctcccaaggcttttaaggcctggcatggacctgcccccgagaatttttctcacctcatttggactcctctcctccctgcaccttagggtcctgccatattagactgtgagttctatggaagtgttcactctttcccctcaaatccccgcagtgcctggaacactgtaaaaatagttaacattcattgagcatttcctttgtgccagatataattcatatattatttattattaatcttcacaacaaacttatctggtaagcactgcccattttttttaaataaggaaatttaaacacaaagacattaaatagcttgatcctagccacatagcttgagtgagtcttctggatttgaaccctaaatctctgattctggagggtataccctttactgctggtctctgttacccaagatgtaatagatgggatttgctggcatcttgggcatcaaagcatcccggaactctgacttccgtgaaacctacgtgttaggagaatagagtgctaaatttcttctttaatttatattccctcccaaaagagccagtttactcaaggcagttccttatcttttaaagccttgaaatagataaacaataaattgattccccgaagagatggtatcttttaaggtaggatctttttttcattatgtagaaaaatctgctcacttgactgtctgaaaaaagattacttgcttccttttcctctaataaatgacagcagggcttttttataaaagcaatctatacctgtcatttattgctctattaaatctacaaacatcagatattgattgttcccatattgaccataatacaagccaattttgagaaaggttgctgggtttagtcacattatcaccatgggaaacactctgagttgtgcataagctgaagacacctgcctctggtgcatatctatttatagagaactgagatttttgcatgcagaaatacaatcttgagatatatacaggctcaaatcaatgtgaagtaagcaagaagccagtgaatgccctttctgaaggtttctgcttgggagtcttctaaagaattaaacatcaatttattgtttgtagagtatggagatataacaacaaatgaaactcgatgtggattatttatgaggaggttaaaaggctccatttatatcggtgatgtcacatgtctggatcatcctggcttttctatcagggactctgttggccaggtttggtggtggtggttttttgttgttgttgtttttgttgttgtttgttttttttttagatggagtcttgctctgttgcccaggctggagtgtgcaatggcacaatcttggctcactgcaaccttcgcctcctgggctcaagcgattctcctgcctcagcctcccaagtagctgagattacaggcacgtgccactgcacccagctaatttttgtatttttagtagagacagggtttcaccctgttgcccaggctggtcttgaattcctgacctcaggtgatccactcaccttggcctcccaaagtgctgggattacaggtgtgagccaccacgcccggcccaggtttggtttttaagcataatcttggtcagaacttgggccacatccttttaggcatctatggaatgctatgttttccatctaccctttgcatacataatctcttcatgttcttctaacaatactgacagttaagaagattaaatacttcttcctccaattgtctaatgaggtaaccaatatttgaaaaagcttcagggtcttgatttcaggtaacaatattaactaacatattatattgaacacttgctttttcatataatctcatataatccttatgctagctctgcgatacagaaataatgaatacctgagaaaatgatgctctgagtatttaatacttggcccaaggatacactaatatcaagtaggagaaggggttttttgactcaggaatcaaaactaagatgtttcaatcctacctgaaatgttttttaaaaaagcactagttatcttagagatagtttctgacttttctatgtgattttgtcaaaaggccttgacaattcatttgaaaattagagttctgtgaatacttgtacctaaactgaattttctgagacaagcatcttgagaaaaatggatgattttttaactttctttgagtctcatgaaagagactacatttttctgagattggcaaaacattatttgatttgttgatggtggttattaggaaaacaacttaatggtaattccatgctttggggaaaaatgtggtttcctcaatacgagatgaaatgtgcgatcattaatttagttcatcttggaattattctcattgtttttacttgaaaacctcatatctgaagccttccacgaggtatagggtcgtttttgtctccatttcccaacttgtaagttctgttctggaaaggctcatgtcaagtatgttacccattcaacccattcctcctgatgtgtcctgtctcgtcggattcatccttcattcatccatctatgcaattcttaattgttcttcaagaaatgttcttaactaagccctccgttatcatcccagattcctatgtatctcatcaatagatctatttctggaattcctatatgtttggttgtccagataatttttagccttgattatatatgatatattgttcatttctaggtgttttctgtgcattttgtccttcctaagttccttgaaaatttctaataaaagttcatagttctagagaaagcactgtatgctgaacacatagaaattattattagactttaaaatcacgtggtacttttatctaaacatttcaatcacaatggggagtaatgagacccaggctaccgtggaattatttttaagtcagtgtgattaggtgtatatgacatcaagctgtcagtaatgtgtacatgtaacatttaatatgtaaacctaagcacatttgggtgaaactttaagtttttatcttccgtttggtgtgtgtaggtagtttttgtagatcacaaaaacagttgcatttgacattacttagaaatcagcacttgaaacaatttgagacttccaccatgcagtccagaatcttcgttgttcactacaatttgcattactaagcattgcttatgttttccaaagtaaaattcaaaaagctctacattaaaaacatattctacatacttcacaaggttattactacttggttgtgttagtgaaaaatctgagctgtcttcctgaaagaccttatctggaggtcaattcttgtaatccctttattatccaactgtttccagttctaggttgaattacaagaaatctgctttgaagattattttcttcacagggagtcactgaagtttttttctattaagctgtcaaaaatattcattaatatctaagcatatacatatgtgtgtacaaaggtaatatatagattacatccatcatctatatcacacattatatatgtgtgtgtttatccatatctgcatccgttctatatatatttatacacacatacgtaatggtgcagtttagaatattgtgtgttagcagatagaaaatattaaaactaaaggtaaaatgagcaggtaataactgcttcctccaaccaaatgttgccagactcctgtggttttgtaatagaaatctaccctatagtttgtgcttcttcctagccaaattactgtcttatctcctaactatgtacagttcagtcaaggagaggtttcattatgttaataattacattgcctgcaggctttttgatgttgcattccccatacagaatagaaacagatttcatagaaatatcattaaagctgttaactacaggagaaaaaaaatcaaagaggcaatcaaagcatatactttattatcaataaatgtaagtagtttcagaaatggcttgcatttgaaacacgttcactaagcagatcatcagcaatggaagctgctgcttaaagggagagagctttgtggtctaaatccatttggatcactacagatgattacttaggtcctttgctattcatttttaaatataggctcaagaatcatttttaaattagcaaactaataaagggatagaatcagccacagaattctgacctgaattcaggctatgtgaattatatataggtcattactgcaatgacaacacgtgacagtttttcttcaaatccacttttattttagttttttttttttttttttttttaacagtggctgttaaattgatgattttggaacagtagaactcattgtactacacagtcatttaaaaaagactttaaatattcaaatgttcaactacatattccctgacactaacatttatcttcattttggacttccagctgagaaacatcagtataatggctcggagacatcagcctcgttcagtattaggaagatagtggcatgccttgatccttctaaagctttttctttgaaaacctcatattcagattcttttttgaaaaggattaattaagttcccaagatttttaaagaaacatatatgaaaaatcataatttaggttttgttctgattattgcaaatatcaaatttcttacagtaaagggaagacaggaaggcagatgtttagatagttgaatgaaaacagagtaagagaaagaaaagataaaaagtgtattaattcatatatgctatgtgacttcttgattatcaggagccccaacatcctataaaacctaaaatatttggtgaattaaagcagatgaattcaaatgtctttgaaataccgatgatttggaaaataaaatagaagtctatttcacaaacacattttagctttgaaacagtagcatttgattaaaagttgaagatagctctttaaagtgaaattatgttttcctgttataaagtaattaacaatcactatgaatgatttgatgataaagaatcactgattttcacaaccaaaagaaaccagagatagctaatccattggcagctaaaatttgggggatagaaatggtagaagctcagatacaatgatagaagctaagaaccctactcctcaaaaaatatacatattacaacttttaatgtgcagataatttcaggggcttgttcatggaatctttgatgctaatgacaggtttctatcataggtagagtagggataaaaaaccacacatcctgtcatctataattaatcaattataaatcattaaactgagcagctctctctctctctctctctctcacacacacacacatacagacacacacatgcacaccctgtcttcaatatgattatatgtaatcaatcatgctttgttaaagattcggctaacttttatatgccgtttattgggtttaatatccaataagatctcattataaagtgctctgttatactataaatttttatatatagtcagaaattactgttcccagtgcaaatagtgacatgtaatacatctcatttactccaacataagtacttaatttgttctgagatacaggtgttataatgaatttccactgtaatgaaatattgaaatttaaaaaaggtagttggataggctgacattgattgatgagttacttgcatagattatgcatctattctgaaatctttccattctttgaagaaataggtaacttgaatggagatggggagaaattagaagcagtttgccacaaaattattgtccaactgaggggatcagtgaggaatattaaagacatcttcgaaatgatgagcagttaagcccattaagttccttgactgacatactaaaatgtaatgaaatggaaggctgaagctgttaacggtattgatttcacatctaattcccattgttaaaaattttttttctttttctttttttttttttgagatggagtctagctttgtcacccaggctggagtgcagcggcacaatcttgcctcaatataacctctgcctctggggttcaagggatcagggatcaagggattatcctgcctttgcctcctgagtagctgggattacaggtgcccaccaccacgcctggctaatttttgtattcttagtagagatggagtatcatcttgttggccaggctggtcttgaactcctggcctcaaatgatcctcccacctcggcctcccaaagtgctgggattacaggcataagccactgcatccagcctcattgttgaacatttttgagtctccctttatttcattttctcttgcagctcatgtgcatgtaatgtatcacatatgtaaaagtatgtaaattatactaaaatatactttatggatatggagctgaataaatgtataagtatatatatgtacatgcatacctatacatatcttcataattaatgtaaataatatattcttcatatatatgtaagaacatatatatatatatgacctataaatcaaagggaaaatattagggaaataatgaatttgaatttctggcatttttgtgaagatgagtaagcatttaatagctcaagtgaaacacagagcctcgacactagccaggaatgcagtaaacacatatctaacaagcaagcactattttggtctatttcagagcactgatattttatatatgaaatatatgtatattttgatattcatatttattcaaatcatacaattatgaaatttttattttaacatatgagaataatttgaaaatcagatcataaaataaattttacaacgaaagagttgaagtagaaaacaatttagtaccaaagggcagtcatttctcaggaaacaaaaaggcagttggaaactttacaccaacaaatcgaatgttctcatttggctggcaattgataaaaacgcatcctgttgttgtgaatacttaaagtaaatgatccagaagagtgcagttgatgcccagggtattgggattggcagtaccagtgtaaactgagtgcaaattatggtacttactgcctgatatttccccgccaatagtaattaagctacgtagatataaagaaattatcagatggggaaaagtgcccacaggctcacatgcacaccaaacacatagacacatgtaccgattttagttcataccagatgtgtgaagaaaacactcttttctgatcccttttagtaacaatgatgaatcaacaaaatcaaatgggttagactacataaagtgccttaggcctgtgatttatggtaacatttgtaactgtatataaaatcactcatttggctgacatttaatgagtcccttctatgtagcaacattgtgcatatccttgtggaaaagacagttgctgcaattacttgcacaactcaatggagtgtgtactggccgttctcctgggacaaagaaccaggacactgagcagccctggctaggcttagcaggagaggagtgtggcctcatgtttgttcttatggggatactgctttgagctgcagatattcctatagtctattttcccccatgatgcctgacggaagtgtgtgtgtggttgtcatatctgtttcccagaagtttccaagcctcaatgattctcagagtcatggtcaggtaaggctgtgcatgacctcccgctccagaccatacacagcccctacattgctaagtagctctctcagattgctcttccatattctcataggtttcactctggatgaacagttcatttgcagcttctcttccgtgccacacttggaacctcagaaaactctgagtgatatgggcacacctcacactccttccttctcagcaaatttgccacctactatgcatgtggtggatcagataaggtgcattttcttctcctttgccccttgaaacttggagtccatttgaattgtgtcacatcaccccattgtgctctagtgggagagatgagcagaaacttcccacacactgcctccctttcccttcccccagatacccactcatctcccagtcctcctggagtggttctgtttgggaaactagggctcagctctcacctgctttgaatgtgttacaagtcacaggaggagtgatgcccttggagttgggtcattttaaaatccaaatctctgctcccagattgagccatgttcacaacaaagaacaccctttccatgtggccacaagagagcaagaaggaacacattcaatgagtactttacttatcaactgggccacatgtttatgcactgtctgcaccatatcacaattctggatccctcacatacggcatatatcttaacaggtcattcagtctcaatgttctcgttcctttctctgccttctgtagaggaataataggttcagaatcagaaatgtcccctcttgaaatatgtgcgttgtctttgtgaatatatcaataatagtataagcatacaaattatttatgtttttttctttaaaatacagtactgtgaccatccacttgaacaatattagtggacacatttttggtttgctttgtttcatttttttcccattaaggaaatgtctgctttgttataacacaatactaatgcatcactgtacactttaagactcctcgttgttcaactttttctcttaaagtctcctttttggaacatagagctttttcatagaaaaagtatttcttcctggaagaatattgaagtggagacactcataaagtgtctgtgaaaatacaactctctaggagtaagggttctttctgtgaaataacacatcaaagaggaatgaggagagcaagacaaaacccagtagagatggattggaatgggatgcattactttggagtcatgaaacatatgtactgtctgtgtatatgtatataaacatttgtgtaaatatatgtgtgtgcgtatgtatgcatgcacacatgtttcttagctctgttcaccaaaaagacctagaagcaaatgcactcaagtagcaacttatacacctaggattcaaatatttgtctttataccattccccactaaaagaaccagaaaaccttgaaggaatgtctttttctagagctgaggcaagatcaagatgagcctggaacatattatgccaaaaagaaaagaggtactccaataaacaatggggcatgtcacagggacagagaaaaacgattaaaaagagcttccctagttgaatctgggtaaatttgaacaccagtataattaaggacaataatgaattatagattataaaaaggaatccatgtgcccattgaaataaaagattcacaaaagagaaaaatatggacttttgcttatagtcaaatgctaagtgtcaacaagtaaatgtagagaaaggaatgctggaataggaaaaaaaatcattattttgtaaccaccatgctagaaatggactccatcaagaaccattagtagatgctaaatctatgggaaatgttgataacaagcatatttatatggtcctaatgttatctccccatgggttgcttattagttgtaagtggtagagtagagggctgggaaggcgtaggggaccttcaaattctgcttggccaagtactcagttctggaatcataaatgaggccagagagagagcttgtgcctctggatgtgatgccctgagaacagatcatttacatttcatttgtctgaatgcataacctaagtctaacatgagacagagacacattcaaaatgatgaacattttatttataaaaaggggctagattctttaaaaatatcagttgcctgaaagtcaatgtatttagtactgttccaactcacagcagcctggaaagacatggcaacaaaacctgaccctaaactggatcctaaattggtgaggggagtgctacacaaatgacattattggtcagttgccaaaatgcagatgaagattagataaaagtattgtgttaatattaaattcactgaagttgagaactatactattcatatacacatttatttttaagaaatatgtaccaaagtatttaggattaaggagaaatgatttgggtagcttattctgatgatatatagattctcttgtgtgtgtgtgtgtgtgtgtgtgtgtgtgcgtgtgtgtgtgtatgtaattatacagaaaggaatattttggtatatatatttcaaagtgttgacaataggtaagtctggataaaggaaacatggctgttctatgcactatcctcattcttaaaatttcctttggttttaaattatttaatacctttttaatggcaagaaggaaaaaaaacacagtaatttgtaaagataaaaaagtacagtgttaagaacaaggaatctcaaggttccaggactgatgggaaatatgtgaaggtgacattaatacatgttctgccatgaatagaaatatttttccaaatgaatgtatgagcagtgataccataaggggcctgggttccatggaataaatcttgaaaaatgatgcagagttacgctgttaggttccacgctgatctaagaagtgtatcaacagattcatgccagtcagtttttcctatgccatttttgctatggaagttcaaactctcagaactgtattacaggcctacaatgtatatctgtccaaagctaggtgttatccaagcctggggaaaatacacagacaacattattaagtaaggctgtagttaaacctggaatggtggtatcatttgttgattttaggtaaccatagtgtggccattgcatttaccatttacaagctatatacaggtccatatgcaggaatacaaaattatgaaaaaatacaaaatttgcagagaatcaaaatggaagctttttcttaacacattctgtatctgaacctgacctgacctcatgctaggctattcatagtctctaatgagcccatttggcatgaatatcatatgctttactgcaaatatatagttacatttgattaacaatgtaaacaatttgatatgagtatcatatgctttactgcaaatatatagttacatttgattaacagggtgctactacagaccccattagggaaaaaagaaaaaaaaaaccctgcacagatactatgttacttttctaaaatctgaaagtttcaaaatcttaagatacctgggctgggtgtggtgtctcacacctgtaatcccagcacttcgggatgccaaggcaggaggatcgcttgccaggagttcaagactgtcctgggcaacaacatagtgagacccagtatctacaaaaaataaaaataaaaaaataactggtcatgatggtgcatgcttgtagtcctacctattcaggaagctgagacaggaggattgcttgaccccaggagttcaaggttgcagtgagatgtgatcatgccactgcactccagcctgagaaacagagcaagactctgtttctggaaaaaaaaaaaaaagtgttttaggtaaacgattgtggatctgtgctgtctaatttcattagcagacaagttatttatccttcttaagtaacaataataagagaaaatgtaatactaaaaagtggaattgaaaatggaacactaaaattcatttaatgaacccagaatcaggcaagattttaaaactctgacttaaagaaagacaatgtggtaaattatccatagctgtgcgacctattttaattataagtagaaccataatatacaagtactccaaatgtactttctcttttccttctgcagttattagccatgtgcaggcaaagacatagtggcatagtggcaaatttttcagactaagaatttagattcacaatcccactctttgctgccattatcttagtcacttgtactcctttaccagtttctctaaatgtaaaataaaataggcaattttggttaatgtaagctttcttatgaattttaaaatgaagcgattctaaagcttccagagtttatatttttatattcttattccatattattctaaaatacatactcctagaattttattgaactgtaaaaatgtaattttgtttgttttgagaacaaaaacccacttatcctaatcacttttctttctttctttattatttttttatacagtgcaagttccagggccagtagaaaacctgcaagctgtatctacctcacctacctcaattcttattacctgggaaccccctgcctatgcaaacggtccagtccaaggttacagattgttctgcactgaggtgtccacaggaaaagaacaggtaggtgaaggaatggaccacactgcttccatctgttggatgtttccatccattggatagctctagggctggagaaataggaaaagacccgcaagctcttgaaacagcccagtgttaacacattcattgaaaagctgattagttttaaagcacttgttattggaaactttacacaatttaattaaattctggtggtaagaggtaaatgggcaataaagtgaagtcaatagaaaggataccaattttttggttgagtctgcagtggcctggcgtgtgtgggcaaccagatttgtattaactcacctggtcgtggaaggcatttgcagttttattccttagactaaggggtgattgccctcctagtcaatggcgtttgccaaactgcttttttcattctaagacatttatatctaactcccttccatcatcaggatgtgtcctaccattttttaatgttttcagaagaacttactctgagaagcctagtctccttctccttacattttgctcctacccaatggttagcatagacacctgaaaagaagcaaattaactgttcaggtaaactaaaagtaaaaaggtctttagggagacacatgaaactgaaaaattctatttggtgatacatgcacacacatatgttaaaaatagaaattgagtttcatatatatgtgtatatataatatgtatacctatataatacatatatattacatatatacgtatatgtattatacatgtataatacatatataagcataatacatatacatctatatgtatacatatattatacatgtataatatatactatatatattatacatataatgtataatatatgtatacatatacatatattatatattatataatacatatatacatatacatatataatacatatacgtatacatatataatacatatacatgtgtatatatacatatatgtgttatacataatacatatataccacatatatgtattataacacatatataccacatatatgtattgtaacacatatatacatatatgtattgtaacacatatatgtatatatgtatatatacatatatgtattgtaacacatatatgtatatatgtatatatacatatatgtattgtaacacatatatgtatatatgtatatatacatatatgtgtatatgtatgtgttatatatagtatatataatatataatgtatatgtattacatatctatgtatatacatgtattatatataatacatatctatgtatatatacatgtatgtattatataatacatatctatacatctatatgtatataatacatatctatgtataatatataatacatatatgtatacatatatataatatatgtatacatatttataatgcatatatatatgtatgactgttgaggtatttacttcccagattctcaacttcatgtaggaaaatatatacagacatgtatatattcaatagttaaatcaaaaattggcctcaggatatgggagttcttattatttgttgtgaagcttgtcaagcatagaaaggccttcctgctttcacataaactgcatgatcagaatttttacttaaaaataagaaatattttatattcaaaaatagctcaagcccagtcccaaattatattataagataagcattacaagagctcctcctatgtaatcatgggttgtatttttttcttgctatcttcaagctattttttgctcttgttttttcaactttctgttttatctgcctttctatatattttagctcttcaacgcattttgccaaccaatttaaataaattcaaaaccatcatcatccaagatagatgtgagtgtgaagatctgattcctcagtaaccttcacctccagtatctcatttactgcagccatgagaggctcaaataatttcaaccaatctaacagcattttgggagataaaaattgtggcaaagtgtctgacagtttcaagagctgtgggtatatttcagcaagagaagcacaaaatctattatttcttggtgaattcttccattttgggtacaggagaaaatctctgttcccatggcgttataagctgccttctgcctgtgagggtttaggtgtgggtagaataacccaaaccattcagtacattgagtagtgttaaacaaattggaacttaatgactgtaaaaatagcatgtgctgttttaacaaggagtctacagattagttggtttttagtgggggagtctgtgtcacaaggtaggttttatagctcattagaaggctggagtgtagtttgtaagagtctaatgtccaattcactgattgcacagaatgagtgccatttctactttaatgtgcttccttgataacagttttggtgttttatgtctccagaatatagaggttgatggactatcttataaactggaaggcctgaaaaaattcaccgaatatagtcttcgattcttagcttataatcgctatggtccgggcgtctctactgatgatataacagtggttacactttctgacggtaagttaaaaacagtgaaactccttttacatatttgacataatattgacaataatgacatgatattgcacatatatcatatattccattttcaaggcttcctgactaaaattttatggactattacagttaaatgtaaactttctatcaagatacatactcccagctggatgtggtagttcacacaggtaatcctagcactttaagagactgaggcaggaggatgagttaagcctaggagttcaagacccacctgaacaacatagtgagaccctatctctgtaaatgttttttttttttttttttaattaactggatatggtggcatgcacctgcgatcccagctacttgggaggctcattctggaggatcacttgagcctgggagttcaagactgcagtaagctgtgatcgttctactgcactccagcctgggcaacagagtaagaccctttctccaaattaaataaatatatatgtatatatgtatatacatatgtatatactcttgagtcagtatatactaataggtaatcctcaaaatgtgactattgactaagagctaaaactttgtgtattttttatttctttacattttctaatacacatttgtgcatgtgtggattaattttgattggcatgttttattcccccatctaaaagtgtgcagatgattaaaggtgtaaatgatagacaatccccctatatttacctcttaattagaaaatatatcaaaaggaattaggccaaataagctgatattaaaatttaaagtattaaaattgagcatgaaaaatgtgtatgttgcctactaaatggaagaatagacacaaacacacacatttgagacaagaagtgcagtgactcaattgtgcttcactacaccctttattcctgggctcaagggcttttcttttcttttccttttttggaaacggagtctcgctctgtcacccaggttggcatgcagtggtgcagtctcagctcactgcaacctccacctctcgggtttaagtgattctcctgcccccagcctcctgagtacctgggattacaggtgcatgccaccacccctggctagtttttgtatttttagtagagacagagtttcaccatgctgagcaggctggtctggaactcctgacctcaagtgatccacccgccttggcctcacatagtgctgggattacaagcgtgagccactgcacccagcctcaagggattttcctgccgaagcctcccgagtagctggaactacaggcataggccacagcacccagctaatatttttattttttgcagaggcagggtctcactttgttgcccaggctagacctgtttttgaatgccataaaagagaggaacaaatcttaataaagagaataaatttgacaaaataatggccaggggaaactagaaacctaactgctagatgatcatgaaaggttgggaaattttataaaaagtgaaaataaaatacatcaaagtatatgatgtggggccaacgaaaactcaggcaggtgcagaaatgtagcgataggcccttgtgaatattaaaaaaggccacaagctagctcttttcagcaacaatttccatttggtgtgtttaattctataaattatttatctttttaattaaaaaatgactttagcttgtgatttcttgacagatctatcattgtttattctgggaaagtacctgggtgtacatttcacacaatatcagtgaaatgaggaagggcatgcatattattaaggacagtacaaagagaacacaggaataatgctcatttgcaaattcaactttaaaatgtattttatacgtaataccactttggtatcatttttaatgtaattcttaggcccatccatccaattctgttattgaagacagaacagaatatttattggtagaataaattacttcacaacttataattataaaaataaaagaaaaacaaatgaaagtgaatgttttacataatttatgtagatttcattcactctgaactgtaatactgtggcctgattctccactttggttttaaatgtcataagtgagaaagatagattattattcattagtccaagaattatcttctggaaatgttacaatgtttaggacttagacagtgtctgtcagtataaaaaaagtatttcgtgaccctaaccccaataaacatcactgtgcaaaggacaccaaattctctctctcaaatgcactgaaaggagatagcaaggactttataagcttcttagagtggacaccgtgacctcgtttgcattcatttttacaatcaacccatctcttttaatgtccaacacaaatgtgtggctcttggctttcatttccttattatccagttcctttctgtctacttcaatctcatgtctcctcctctgtcctgaagctgttcatgctgaggtcatatatcacattgagttgtatttaatcacatttaatagtcacctgcttcccagtcttcagtcatggagcactcttcttcgttaactttatgtatgttgtaacaggtggatgttgtgaaaattaaatgggctgatctgtgtaaacatctaacaaagtgtatgacatttaagtgtttaataaacattatctctaccaaagtgcacttcactttttctcattatattaatattaaatacccctaaatatgaaggatgctgttatattcacctctgttttcttcctgagtaaatatttatcgaattaattagacagctcagtcaaaactgtgcaaatttctgtatgcaaaggcttatctttaggatttcccatttgtggaactaatttgatatattaatttaatatatgactgtgtctaaatgcatctgtattatagtgaacataataattcttttcatatcaggagtcttaccataaaaaatatattgagacatagaaaaatttttaaaaaagcaaaagttaagtgtaaatacatttcttccaatttcattactttatgtttttttttccctgttctactgggatgcttgtaaagatctttgtccagatgagctgtcatctctaatttagctcggctttattttctgagtagaaaccttattttttattcaaattcctccacctagaaaaccactggtttacaatgagccatttttttttcacaccactgagattatacagcatatgatcatctaaataattttgccaatttgttccaaaatactgtctcttgcactagttggtaagtcactaagagcttttatgaacgaatgaaccattgaaagtttccatgccagcttgtcctgtgtccaaatgcagaaggacctgatttcataggcaacataagaatgtgcttattatttttatgaatgttattaatatttcttgaatacttactaatggaaggccctgatccaagtactttgcctttacctttcatcctcacgatactactaaaattttccctactttacagatgacaaaactaagtcagaaagagttcacaacaggtagtaagcagcagagccagaccacataagctagtaaattcagaggcaagattcattgtggaaacatgtttcttttattctatgataagtgcctttaaaggaaaatgcttataattaaatatgaattactggccaggcatggtggctcactcttgtaatcccagcactgtgggaggcccaggcgggcagatcacaaggtcaggagatctaaagcatcctggctaacatggtgaaacccactctctactaaaaataccaaagaattagctgggcgtggtggcgggcgcctgtagtcccagctactcgggaggctgaggcaggagaatggcgtgaacccaggaggtggagcttgcagtgagccgagatcgtgcctctgcactgcagcctgggtgacagagcgagactctgtctcaaaaataaaataaaataaaataaatataaaataaatatgaattactgctgggcagtaattacacttgtaatcccagaactttgggaagctgaggtgggtagatcacttgaggccagaagttcgagaacagtctggccaacatagtgaaattctgtctccaataaaaatttaaaagttagccaggtatggtggtgcacacctgttaccccagctactcggaaggctgaggcaggagaatcacttgtacctgggaggcggaggttgcagtgagcctagatcacaccactgcattccagcctgggcaacagagagaaattctgtctcaaaataaattagaattattttggtctataaattctgtgtacatggcagcatacatttgctgaggggaggaattgaagtgcctgtgccttgggagactcatttacaattatggggacttgatctgtcctacaaaatacctcatctccatgagtttcaagccaacatccttctccatattgagggaagtttccagccccacctctcattggcttgaatggacctatttattataaataataaattatttgacattttgaagagaaaagtgttctttcacttctgcctcatgaaacaagaagcgtcttgggaagacaaatatagaaaagaacaatcgatatggattctcttcactttcacctagccctagcatctattgtatctatctatctccaaataatatggaaattgatagtgagaaggagggagtaggaactgatcactaaaaatactgtagaaaaaattctctactctcctccctgacatgacaacaatagccagtgtgctatcagtggaaagttagagaagaaatgtgcactgtaaaaaaatacagaaaaactacttcaataccattacaaaaggacttttagcagaattgtattttattgcctttcaattcttgttttttttttttctttttttttgagacagagtctcactgtcttgcccagggtggagtgcagtggcacaatctcagctcactgcagcctccacctcccaggttcaagtgattctcctgcctcaacctctggagtagctgggactacatgagtgtacccacacgccaggctaattttttgtatttttaatagagatagattttcaccttatttgccaagctggtctcgaactcctgacctcaagtgagccacctccctcgggctcccaaagtgctgggattacaggtgtgagccaccatgcccagcctgcctttcaattcttaatacagaaaacagccctgatgcttataaaattgtggtagctacagaaaaaagaacacatatatatctatcctcttaaagttttcttggctttctagaaataaggagttaaatgccacttgtaaactcaaatgaaagtgacatttaagggttgcatatcagctagaacagtacctacaacaaaacacatgataaatgttaccttctctttcttccaaaattcaattatctatcaaaaattcagttagtaattgatattatgtttggatactaattgatcaaaaagttagtgtaatattattagaaacatatagcatgacatgtcagtattacaacattaaatataaactagaaatattctttcatgtttaagaagtgactcggccgggcgtagtggctcactcctgtaatcccagcactttgggaggccgaggcgggtggatcacgaggtcaggagtttgagaccagcctgaccaacatggtgaaaccccgtctctactaaaagtgcaaaagttaactgggcgtggtggtgggcacctgtagtcccagctacttgggaggctgaggcaggagaatggtgtgaacccgggagacgaaggttgcagtgagctgagatcgtgccactgcactccagcctgggtgacagagcgagactccgtctcaaaaaaaaaaaaaaaaaaaaaaaaaaggaagtgactcaatatcacttaatattaagacattatttccaaactttgcttttaaaggataacatttttggaagtttgtgaaattatatgatatagagcatgttattttattctacaaatagtacttcaatttaaaaaactaaattgtaatttttatgtcaataattataacgtttagaatagattaaataataatacaagtacaatttatactttaacttaaaaataaatttacaaaacaaaacttgggaccaaaccctgaatatggaaccatttttattataatttataaactttttattaatatatttattcagcaactatttactgagtgtacatcatgtgccttcaactcttcctgatactggtgatacaacatcaaaatgaataaatatctttttccttattggggttacattctgtatttaattttaaaatcagaataagaatctcaaaaaattaaataacattttataaattgtggaatatttttgaaagaatacttgctgagttaattcatgaaaaacaagcagatgagcattttgtcagaaactacactggctgcaaccttcatcaggcactaagatcagaagttcaaaatcaaaataaaaaaaaaagatttcattttctgttattcccagaaaggtctagaactatataagtaagtactcatttgctcattcaatcattaattcagtaaatattaattgaatgtcagtttggaagataaaagattaatcagtggcacatcatgtcttcatgataattactatttagaagataaattcagagtatggcataaataaattcatggtcagatgtaagtactctatagaaaaacatagatttttttccaaattctagtaaaagaaggggaaagatgtcaaaaatggcccttagattcttgaaaatgcctgagaacttttctattaaactcatctatttgtgaggaacaaggatagggactactcactttatagattaatatgtgttaacaatttattgaatgctacttctattcctattatggggcaaaaagctttatttcatttatttttcatcccagacatctagagtagttcctgacacataaaagccattcaataagtggttgtttttaaattactcacatgatagaatattcacttttttggtagagtaaatatttattataagtattaaaagagagctgtatatgttcttccttctataaaggagtagttaaataaaaatgtaggcaagaaaaacaaaataccgtacctagaaactctacaaagaaaaatatactgctgctttgctaatagaattgactcatcaagtgctatttgcaacctgcttgtatttatcacataaggtttaattttacacagctaaaagaactgagaagtatttcttcttttcactttttaagagctaataaagtttgcattacagggattaagaaacctggctgaccattagaatgacaaattttatcataaaattatgcagattctgaaatgcgcaatatcttaagcctttaaaactactgtaagaaatctcctgtgtgtttttattggtttctctgggaaagttatcacaagagggctgtaattaaatggtggtgtttggtatcactgcccgcgttctcttgcgtaacagttttaggggctccctacataggtaagttaactggctagcgaaatgagaaaaaaaaaatagacaaatacagttatttttcatctctccaaaaatttttgaagtactacctgggttaacctacctaattatcattataaactatataaacaaaaccacactctctttttactagacaggtggtatttttctttcaagattttggcagtaactgtgacaatttgtttgattccttttagtgccaagtgccccgcctcagaacgtctccctggaagtggtcaattcaagagtaagttggctaaatgttcactactccattacctatcaagattacctatcatgtataaccttcactcacccaactgctgtcttgagtacaggatagtggcttccatgtgcagaaatgttctggaacaacacagcaagtgacattgatcccacatcctcttccatcagacttaagtaaattaaatgaaatatttgtctacttctaaacaaatattttgatttacaaatattaaacaaacattgattttgtgaatgttttagtggccaaaggctattccataaggaaacaaagacatctgcttcgtctatattcaccagtctatcatatagcaatgatgatgtgctagatgaggaaattgaaataattaggagaaagaaagactgtttcctaacacattacttagaattgaatatttcgtcatcatccccattcttcctttataaatgtagtcattgaaggccattcttgaacttcaatacagttatatttatgtagcgatgttacctagttgttagaactttcctggcctggaatgttgctatgacttccaaaggagctcaacttaggctagtattgctgaagtagcctaatgccagaggtcagttttctagaaacatgtcattatttcaagtgactcagggttggaaataagccaaggccacctagtagagtataacaaatgaggattcacctggtttgaccctgtcaccacctggccactatgcttggacctccagttaggtacttctcatgtgaggaaattggcctaaatgatttctaagctctgggagacagcagagaaatgatacaggtcttagaaaaagtcatactctgggttttaaatctagctttctcttttcataactatttggtcttagcaaagttttcaaccttagcaaacctctttctatgtttaagtatcctaagaattactatcttccttattgacttatcatgagaaagtaatagtaaaatgtatgcgatgaatctgacttgatagtgattccttcattccatgtgcaaatgccttgtcatattttgtaaaaaatctatgaggaagccatatcttgtgatgttaattggatttgtctcagtcaaatgaatttatcttttgaagcaagtgaatgcattattctcttatacttttaggcaatatgttggataagaactattaaagcaaacataaaattagaagaaaataactaaacttagtggaaaaaatgagctaaaggaaaataatcaaaaattaacataaccctacaaatgacatttttatctgcaacaacactgctttagagatgtgccacttaaattaagagattgccaagtcaaagtcaagtagatttttacaattattgtatgttgttaatgaatgaaatttggaaaacatattgtaatgtctcttgtttaacaattcatcattgttagaatcctcactcactttatgtttttcctccaggacagaatatagaaattgatatacaagctattttgtgtttgtgtgttcataccctttaagagtgtactccaggaaaagatgaatgttttcacttgaaacgtgtatagggcattactgaatgaccctggatgctaactgtatttgaatatggatgtactttactgaagacggaattcctggattgcaaaattgactatatatattatacacacacacacacacacacacacacacacacacacacatatgtatatacacacacacacacacacacacacaaatatcacagcttctactcttctctaatttgcttgcttgcagcaagcaaatacaaacacttctacttctatcctcttgtagttgatatctggaacattgcactgctagaaagtttaaattgttcattcgcttttcagaatgaaaatactatgcccaggcactggaaagtcacactccctctctcctttttctctctctgatcttatttcatagcttctaagaaattatgaattataaatttttatatcagactgttttcaagagaaaagaaactggatgatcaaaacaccactttttgcattctcagtgtattgattcagacaaaggcaaatgtaatattctattttgatatttgtgttttctttgaaatagatgaaaagttttaaaatatattaatatttacccctgactgtgaccatttcaaggggcaaactgtatttaaaaagaaacattatagttgaataaataatgtgttcttttttaatactaacagaattccagggtgtttttattttttttattctttagagacaaggtctttctttgttgcccaggttggagtgcagtgacacaaccatgacttactgcaatcttggactcttaggctcaagtgatcctcttgactcagactctagcatagctggtactacaggcatgcaaccaccatgactgactaatttatttttgtgttttttgaaagacagggtctcattatgttccctaggctggtatcaaagtcctgacctcaagctatcctcccaccttggtctcacaaagtgctgagattacaggcatgagtgaccatgctcaattcatgaattttttacgtaatttattttacttgggattttaagatggaagagaacacactttgaaaacgtattctatatcatatttgtaaatatagagcacaattgatttttttattgatagtaaatgaaataacttggtgcaactaacatttttgcagaaagattattaggatctctgtacataaaactgaggggttgttataagacatatgatcacaatctaggtactcgttaaggttttggtcacccgtaagccagttggacccagaaatcatgttccataataattaagcagagaagtctttacacatctagataatggaactaagaacaaaattctcttactgtatcattcttgaaaacccagtatggtagaatatttttacaaagctgtaatagcagaacagattagattccttttctacaagctaactatgaacacaagttttttgttgtactaatggcttgacttacacatgttacatgtcaggtgaaactgggtcatagtgaggtggttatttctcatactaaaattttgttacaagaaatagtatcttttccagaaaaagataatggtttatgaaatggactttaaaatgttacgttttattaggaaaactttttataagaataatttccttaagaatttaatttgaaattcaattattattcaattattattgattcagttattatatatttcaaatacatactacaacttaattagttggctggaatataaaggatacatttacagaatgcagagagctaatgttggggcacaaatattaatacttccctatgtttcaatctaaaagttctgatgagtaataatgtttagaggatgatagaattcaagttgcttgggtccttttattaactctttgaacctgtgaaaagtcacgtgtctcagttttatttattcaacacttactctgtacctgttttaatgtcatacataataaggaatgtgatctagaatttgccttcatgcagctcacagttgggtaggaaaacgtgaaagaacattcactgttcctctagccactttaatctgttgaacctttcaaagttgacattattttctcattttaaaatgagagagctggatagagaatctctaaaatctcctgtggcttcaaacatctgtgcctgtgtttctaaccattataccttttctcaaccattttactgttaaagaattagcgaaaacacaaatcaatttcagtataccagtcaactcactagttcagatatatattgactgagcactacagagtgattgcaaggaatgaagtattaactcccctttccccccaaaaccccagtatattatgaggcatagatcattgttcagatttaaatttttaaatgcaaattgatggattcctctcattatatcacctcacacctctctgctgttgaaatccttattcttgaacaccagatgcatctatgtgaatgtctttttgttgcattcctaaaagctggtactcagtcactcacaatctgatattgtacatggtgccttcaaagcaaccgaagaaaaagtttctagtgccttcctacgtcttaaagtgtctcactctcccttgtttcagcacaacttggcatgcttaaataactcaagcctgagttcagcaatcatatgatttcctttatgcaaaaactatacagtaggagaacagcaagtttctactctgcaaagcaaactgatcatttttaacagatattttaacattctttgtgtgtgtttgtgtgtaacaagacagaggaaatctaagtgtattatgggataactgcagaaggacatgcttttgaggatgtggtgcaacttgttggattttgatggaagtctctataccctgtcattgggctggtgttgcttctcttattagccaagtccatagccaagtgggtggctgagtgagtcatttgcatatgactcctagtgggaagggaggagatggggaaaagctggaggcaaggaaaaaatgtgagttatgatattaaattgcagatcctctgtgtctggggtatgtgtatgtgtgtattcagttttgttttgtttttttctgaaattggggttatcttctcttggttattcagaaggggtttcagttcacacacctccctgctgcgtgacaatctctctgaaaacatacttttagaaaaggggtctggacccacttctctgctttcaccattcttctagtcaacgttcatttctctcctgtatgttgtatggagtcataggcctcaggcagcccatggaaaaacatgcttcttcatgtctccctaagtcctttataaaatacactttggctgctgagttcctggacccagagctctgagccctctcctcacaaatgtagtaggtttaaaaaatggatttagtgaagagaaagaggatatatatgagactgcagatgattgtatttatttaaagataaactagaaccagcatttgcttattaatgaacaatttaaatacaacaatgttgactctcacaagcttaacaatgacacttgtcctcaatcataacacagagcatttctgcctgagcatagtatttgccctagttatccatccatttaattcaagtaggtgtagatctcttatatttattttagttattgattccttcatctattcattacatggtgatttttaagcatagataatgtccaggggcctatgattgaaagttttaggaagggtggggagtaggagcataattgtaaggaaggcaatatttcctgggggctcttacagtctagtctttctgtttggaatttgtaggaaagactagactggatataaatgattatattacataagaatcagataatttgtaagaatctgtgagactcccttaaggataagattgtgtttggtctataatttgggtagaactcatcttcagatctcttccatcctgtctttttacttaatagatccttttttattgtggtgaaacaactttatataaaatttaccattttttaatttaatttaattttttaaattaaatacaaatttaagcatttgtaaatgtgcagtttaaatgtggtaagtacattcacattgttgtacatctatcaccagcttccatctctagaatattttccatcttcccaaactaaaacttagtatctattcaccagtaagtccccatttccccacacagtcatagatgtttgaagccacgagattttagacattctctatccagccgtctcattttatcaatgagaaaataatgtcaactttgaaaggctgcaacagattaagtgtggctagatgaaaagtgaacgttctttcacatgttttcttacccaactgtgagctccatgaaggcaaattctggatcacattccttatgtgggaatgtgagagaaaatggggagttattggtgaatagatactaagttttagtttgggaagatgagttctacccaattacagaatccctggcaacgactattttactttttgtatcccaacttactttataaatgagcaaagaaaccaattcataaaaaaattaatttcccttttgcttcatttaattgagaaataaaacagttttccatttttagatcccctttcttatagagaaatgaaaaacttaatgaatcagtggtcaagaatacagacagatgctttaattggctaggaagagatgcctcacttcccattattgtcagtgctttcagaatacttctgttccaaaattccacatttataaattgtttttagaaaatctgctgaaaaagccaactgtcatatttaataagaggaaaccagaaacataaacataggattgttccaaagaaactgtaaaagacataattttgtctcatattccatcagaatttagaccagagctcctgaccagttgctaaattgattcttagactttttttgaagttccaaaaactcaacagtttacgtcttttttcagtgaaattacagtcaatgaataaagatcaaccatgaattagaggaataataaaatagtaaattattggataactagtttttaaacaacataaatgcatcattccaacttaactgctttctgtaattaagttgaataaaagaatactctgcaaatttgcaaattcaaagcatatctttgtattacactatcactcattttctcagagcagcccttcctaaagtctatttgagagaatacttacctttttcttttttctttttcttttttctttttttttttttttttgaaatggagtctcgctctgtcacccaggctgcagtgcagtggtgtgatctcagctcactgcaacctctgccttctgggttcaagcaattcttctgtctcagcctcctgagtagctgggactacaggcgtgtgccaccatgcctggctaattttttacttttttttagtagagacggggtttcaccatattgtccaggctggtcttgaattcctgacctcgtgatctgcccgcctcggcctcccaaaatgctaagattacaggcgtgaaccaccacgcccggcctatggtactttcccaagaaacaaggttgctatggcttaaaaaattgtgagaaatatgtgaggtttcctattggagatattaaaggctatgagaagtatttgtttaactcagcttttttaccaattgttttttctacaaaaacattttagatgaaatacagcctttaaaactctgtcaaagttacttaatgtcattgtaacattacaaatgagaacaatgtactccataaattgaagaacctcatcttcctccaaaaataccttcttatctcaattaatttaaaataataatatatattaagtgaaaaaataaatttatggaaagcagaagtgaatcaaggaatagttataaaggacatttatgcataactagaataggatattgagaaccttctgtgacatctgttagaagatttgaataagttagagacatgattaaatctccatgtcaatatgaatttttattaatgtaaataggacttaggaaaacattttctagacttttctcatctttcatatttcatatacataaaatacatcatttttctgttgtgttttgagaatgttatatttttgtcttttccaatttattgcagtcactgccattgagtatacttgcacaaaggattttgacaaaaagagattaaaatatatgatagaataccattctcttttgagttctagcctcactttaatattaccttataatttatacttcatcacacacatttctaatggctccatttctgcttggctctgaaggcaaagctcactttagcctttccatgaagtttaatgagatttccctcaagtcatacatttttgaaaagtgggaggtttaataatgggcttaaattaaatgaacctaggtctagtgataaggtctctgattttaatttagttcatggaagttgcccttatagttggaatggttgattagttagaagacatgaataagttcagccctaccagtaggtaaaagcagttgctaactatgtgatttgattttaaagatgttgaaccattcacccatgtgcaaaaactttattcagtagtatagttttgaatgttatttatattataaaacaacttttaaaatgcaagcactttattgaaagatttaacacattaacacgagctattttagtcaatattctagacacacattcagtgaatacctaattataactgtaataatggcagtaacctttcccaaaggtattttgtgcctggcaatgtgctaagcaatgaaagcagaatttcatttattgcttttaataatcctataagatattataaaactaattctgaaataccaattttgaactgtgcttgttgctggaaaggctataacaaaagcaatcaaatgccttcttttctagagcttacttatattctaatacatggaaatagactaataaacaaattaacaattgacacaagggagtggtaagttctgtgaagaaaatcaagaacagtcatgcgatagaatttgaggacctcatttaaatcagattgtcagggaaggaactcttaaggagatgagctgaggcgtgaatagaaaaggatcagctttgtgcacactcagagtaacatatttcaagtgatgccaacaactagggcaaaagcagtaaggagggaactatctttgcatgactgtgaagctgaaatgagaatagaatagaagacggattgctgggttccggccagatctggcggggctttgtagggtgtgataaaagttgggatttcattctatggacaatgaaaagcatattgaaaggagagtaatcagattcaccttttttaagaattacactgactactgtgggaaaattatcagggggtggaacgtagaggaagcaggaagaccagttcagagacaaccaagtgctccatgtgagatcatgtagcaggaacctaggagtcataggaggtgatggagagggaagtagaaacaatcagggtctgtgctggatctagagccaacaaaattggttattggattatagggcagaaggcagagcaagatcaaggatatagagtagatttttggctataaaatgtaagcagattgtggagctacttaatgagataagatttggtttaggggacaatcacttttggacattttgaattcgagatagctattaaatatacaattaggaatgtcaatcatgtagacaagttggtatatgataatagttctgatgacaggtcatgccaggagatataaatttaggagtcactgtcatattgataacacttagggagagactacagttagaaaaaatatggcagaaatttggaatacttaacatttagagattgggcagatgaggaggaatatgacagggataaaaagaggaagggtgatttcacagatgtcatggtggggaagaatgtttccaaagggtgggagctgttaactatgtcatatactaatgagagatacagtaaatcatgtcagtaaggtgaccactgtgggagggagatatgacattcgagagagagtatgaagggattaagtagagtgactatagattatatttgtgaggagttttgctctgaagtggagtgaagagatggatagtgcctttaggaggtggtaggcttgagggaggtgttattgtttgtttcatttatttttgttgtttcatttttgaacatgagagataaccacaacttttagaaataaagcagtaaaagagacacagcaatgatgcagaagagagaatagaaaattgcaggaatgcaatcctttgaggaggcaagaacacacaggatccagtatacaaatgaatgggcacagacaattgaatcttggtaagttgagcaaaggcagagagaacaggtctggatgctgatatattagtcaatttgagctgcagagacgataagtgtaagtaaaggtcatcagagtatgaaggcttggaggaacaagtattgaggatttcaaaacagggaaaaaggtggaaaatggttatctcagattgtagaaaagaagtcataatatacatgacattatgattgctgagtactgtggactgaccatttgagactggttgtcatgaatttaaagtgaaactaaccaacacaatcatgtttgtttttctccccatggttgattgctcagttgctggcttggggtaggcagatagctgggttttattcagtttgatgtttttccagggaagaacgggtcagggggattaatagtttttgcaaaggagtgattaaaaagaaaacccatggatctaagctacctatggaagaaaaaaatgggcatggggcagagtggtgatggataacagaaaaatagtaaggccagtgggctgcattattatcccaattttacagagagaacactgaggcttagagagatgagataatatgccccagtgtcacacagagaagggctgagtagcagcacagggacttgagccccagccagggctgttggtcatttggacacaatgtttcggatagggcccaatgctaagggaagggatgcaaatcagaatacaaaaataagccttgcattcaagtggcttaggttctcagtgggaatttttcccagacaaaggtaaggtctagatcagcagctaggagacatcagaactgttggtggaaactgaaagttttggttctaaaatgtgctgagaaaggagagctagaagaggaaccaaaataacacatttccctgacttttcggtttttttcctgtagtgaacctacatggaagattctgtacctcaagctatgtatttctccccatgggacttaaaaagcacatcagcgggacagcaggtttttaagagagcacaactgatacctcaataaacttcagtagacaaccttaaaaacttagggtatttttgaatgtaattctgacttttcttcaattccaagttatataatatatttgttattaaaagttttaaatgggaaaattgagatccactgaaaagggccttacctcatccctcaagggttgttggccaaaaaaacaaacaaacaaaacaaaaaacaaacaaaaaagccgacctctgattatttagcaacagagttctgcaaccattaggaaatttgtattaaattcagagaaaatgcaagtcataaaactgagcatacattttataatcagtcattattaacttaaatagtaaataaaactaaaccaaatatatattagttaagtatagaatagatgtcagataatagtgtaactgtgtgtgtgtgtgtgtgtgtatatatatatatatatttttttttttttttttttgaggcagagtctcgctctgtcacccagggtggagtgcagtggtgtgatcttgactcagtgcaacctctgcctcctgggttcaagtgattctcctgccttagcctcccgagtagctggaatacaggtgagtgccaccaccctagctaattttttgtatttttaatagagatgggttttcaccatgttagctaggaaggtctcaatctactgacctcgtgatctgccacctcggcctcccatagtgctgggattacaggtgtgagccaccatgtctggccaatctgagtatattttaagatataacttctttagatactaaactgaatctgatatatttttatctggaagttattttagtttaatctcatcaaatgtccaccagcatcatacaatcttaatatatgtactcaataacactcaacaatgaaacccacttatttcatttattatgttgttctttcacatagaaaatgatagcctccattagttttccaaagctgttcaaaacattacccagtctactggaaaactctatgtaaaactgacagaatctaagagcatcatcttcacgtttccctagcattttgtataaagtgtatgttgcatacaaatggatttgtcagatacattgagaagtatgttaatagtaggaaaaagaaagtattaaggaacaattctgtatcttcagaaaattaacttaagaacatattatgtatctaatcttaatgcaactggtggaaattaccgtgtcttctacaaataactttgttccagggtaaacagtaagaaatttcactttcttttttttgtagtaatgcaaggtcctcttatctaaacatttctcatctttcagaggagtctacttgacagaccattttgtgttttagctgagaggcagtagctattaactagattgctgtctattttatttttatgtggataaagttgaagagactcacacaaaagggatttatatgtcaagaaatgccttatactaactttaaacaaaattgatatctttttaaaatatgaagctgactgtagatttttatcttttatgcatagataagtctaaatgttgcaaagaatatatatttccatgtccatgactacagtatcaacatgtatttctctagagatgcctatatttcaatatttccaagttgggttttgttttcttatacttcaaagaaaggaaaatacatttgtgtttcttttcaatgccaatacagataattcccttgatgaaatcaaatataatggcatttaaagaaaacgttgttagtaaaaaaataaaaataaaaaataaaaaatccagatgctctcttaatttggaaggtttatcagagaaaagtcaatgaagaatttaaaggttatttccgttacaatcttggattatttctttcattaattagtttgtttgtttaatgataaatattcattgaatatatgctgtgtaggagtcactttctaaacacttcagctccgtaagagtcttccaaattatttgtcagccaaaaaacctcagcacttctatgaatgtcagcaatcagtgagcaactggcatatgataacacctgggcttgcgtagagtttctgctcttccatggggaattaacttctctacctatgataaaggtagcagacactttccccttgtctgtcatttagagaaggttgggcattttctgactatacttaactttgataatagtcaaggatttcggggtttatgagataagaggtctatgaagctgaaccttggagaaaggaaaagttgaggggccccaattaaagttctcaaactttaaggaacataacaataccttaaaccagttacttgtttaaaatgccaaagatttttccctattcccctaacacacactcttctagtgcattattagttgcagtgttatctgacatttcttctatacttaactaatttatgttcaattgttttatatttctttattatttaaattaataatgcttggttgaaaatgtatgtccagcattatgacttgtattttctctgagtataatatacatttcctaatggttccagaccactgttgctacttctgattcagtaggtctttaagccagaaacttagtgttttcaaattgtagtccaaatagtataaagggagatgatctacagatcccactataataaagtctaattaaataaaaggtttccacacttttgtaatggaataaaatcttttaaaaacaaagatttatgtgacatcctggtataatatgcaaaggcaaagttatgcaaaaacacagattggtctccttgggatgagggtaatggggtactggagccaggttgtactgtcttgcaagaatcaattgttaatgttttaagaattttgtgagccctatgttaaacacagcaattattaaaaattcagttacatagccttataattaaacaaattatattaaaggcaaatgtatcaaatatgttacatgtaacagttcctcattcttttactacattttactattatctatgccctttaggttattcatatcgtatctgtggggtgaaaatacacatctcctcccagctctgttttcagtgacattatgctggcagcttgaaattggccttcttcggtgtatttgcaccacagaactcagcaaatgctacaaattaaagattttttcacctacagagccagattttgaacatttaatagcttacttctagagaagggcggatgctaggattgccagtttctaagcatctctctcaattccctctgtaggctctaggacaccacaggaaaaaaaaatgtagtttaaagaaaggaaaaaagctgacttaattatattgtggctgtgaacatgcaaaggtaaaaagaagaaatcaaaagaaaggtcaaattctttagcatgaacacatacatcttacaaatttggttatgagactataagcctttactttcttccaattccttggaaaaatagcaatagactagatccaaataattattctacctggctatcttgttttgcaagctcctttacatgaagatgattacaaagatgaggctgtataatctgtgtataagtatctccagattacatctttattgtttagctcagaaaatggttcctccatcttcattgttattgatgaatgagagacacctctgcaccttctgtgaaatacaagtgatcatcttgcacaacagtaccacatttagcatttactttggcaaatttaattatagacatttatcctgcttactgtctataaactatgcttttatctgtaacactaacatataatttgatatacccccaaagtagaagaattgcacagtgcctttaataatatctttgcaatgaatataaataatttcattagtgatggattatttcagcctttcaaaaatgaaatgatcagaattttttaatgtttgttagaaaacaaagttctctttccttaagggactccagcgtatcattttaaataataatgtgtatagtcttgtgtctgtcattcagctatttattcatgaatttaattttcttgattcatttagtcaacagctattatgtaactattgtttaaaaattagatactgatattccttaagaagccttatttttaaataatctgaaatttaaatcatcaaagtaaggtgtctaaattgtagtataataggctaattagaccagttagtaattttttcccttactttgaattatatgtaaagggagcaaatgctggccttaagaattttcacttcaaagttataaagtatttacaaattccatagatggagattcaatttagaatactagatgaaaactgtgtttcaatcattcacctgtatgattgatttttctctatagttgatagtaaattcagtgattttttggaaatatgtatgtgaaggaaggatgtaagtctgtgacatcatgcagtttgaagtctacttttccttggggtattatgcagatatgtagatttgcctattattttctttaataaaattggtgtttttttttctgagactattttccaggaatgtagttttgatcttagaattgattttttcctccagactgaggaggacgcagatgtcaagaagtttcctatgggatatggcttgacagagggacacacaacaggagtcggaggttacaataagaaaatatacttactctatgacatgtgggtcttgtaaggaactgacattgatgggaagtgatgctttttagccaaaggaagaagtatctatcatgctgtcacatcagattcggttcaaactaagcaaacatttgtgttatggtactattcttgggaaatatatttctgaatgtgctcttggctctttagatgaaaagtcataaatgatcataaaatacataaaatggtacctgtcataataagcaaatgataaaataaatttatgcttattataactatcaacatctgtatgtgtaaaatagataataaagcaagtgtctgaacaatgcagcacatactagcttcacctaatgcaagcaatcagctattctttgcctgtctttgcagaagattgtgaccaatgatataatgagtttgaggaggctgtttttatgattaattcataaataagttaatctagacttatttcaggtctgggttttacatttgatgactcattttcagagcccagaaaataatatttaagggagtattaattggattgaaacttttaactgtgtgggtgttacacaaattctatttaatcctcagtgtgttagattaattttccagtattaacaattttaattcattctacctttatcagtcttcagcctcttcttatcgcatgcacaacagaaaaacagaatcaccaaaaatgtatctttagactgtaattcttattttgctgactcaaaatatgtgccaaaagactgataaaagtctgattttccaatagttcatttgacgtttgagtccttttacgtcatcttcaagctcatgcttgaacttttctaatgacagggatatttttgtctttaagcaaccatttttgtcatatgtaggtctaactttcagaaatgtatattcaaagttctgtccctctataacgtctgctcatttgtcataattgtttcccctgggactataaatacatctcatgagtttagtgactttctcttgcggcatgacttttaatatttggggatgtctgtcaagggcccccctcccccttctctccaccaatgcttctcttctccaagtaaaatattcttagtttctacaaatatttctctttgcttgtcagctccctacttgacttgtcatcctcctctgcatagttgcaaatgtcatgtgactattagacatcccttaagagtacctctctcatcttaagcacagcattattattcagatgtgctacaatcacattgatgttgtgggtggtcacattatcttatggacttattatggatctgattttccatgaaaacctataagtatttcatgaatgatgctgacaaactgcatgtctttcattctcttcatgccaggctctgtctgactcacatgcaagacctcttcatgtatctttgttacattttatcttacattaaccccactgctacaacctctcagggtaccttgtgtcttcatgcacttattcaacatcaataaatgaaggttagttgtacacctggaatgtgtccggctaaatcgaaaatgctaattctgtggctcaattatttgacacaccattccagcaatcttctctaccactttatttcatccaccatacccaggccatattttaatcttgttttcttctcctcgaagcgactttcactaaaaaccttaaacttcaaaaccatcctatatgacagcccctgtgttcatctgaatctctaatgtctccgctctcaataaactgattagctgataagcctcataaacactttcaacttgctcctttcttttttttttttccccaggtattattattcttattttctcactctccttttaaaactggaccttgtggttgatcaagtgactaaccatattctgcaccctcaagatttattttatttttgcctttatactatcatcatttatctcatatagtcctgatgaactaccttgcctgttcttaaggtcaagctaatcagtgctatgggagaaaatcctataatggctgaaaagcatagatatgaatgaccctaaaaaagccactaaacctttctacatgttgacgttctcccgttctttacatgtgtcatcataccagttattaatccaattcacctgtagtgtcctccctatttcttcatgtaattcacaaaaataattcaaatattctgctttaccccaaaatacacatttttttgcctatatccaaaaggtcaagtaatatgcagggatagatctagctcattttcattcaaactaaaatcatatcaagaaacagttttcagtctttctatacactttttccctagaatatttgaagccgatttttttaggtaattattccaggtttccttttcatcttatttcctgcggtttcaaggtcaacatatttatcatattttcattcaaagccataacaaaaatgagtgataaacagaaaaatgattttcctgcttgacttcctgtttattctgctaaactataatctgattttacttaaaactcttccgagttacctttgtgaataattcaccaagcatgtgaaccactgcttatataacttcatgattgttataaacaccttttttatgtggcatagttcaaggctcgaaccaaaagtgagatacaggaatgaagcaaatatgtttgtcactctttctcatctcaaaatgtattggccaggccaggtacagtggctcaagcctgtaatcccagcactttgggaggccgagttgggtggatcacctgcggtcaggagttttatatcagcctggccaacatggtgaaaccttgtcactactaaaaatacaaaaattaggaccaggcgcagtggctcatgcctgtagtcccagcactttgggaggccgaggagggcagatcacctgaggttgggagttcgagaccagcctgaccaacatggagaaacaccatctctactaaaaatacaaaattatctgggcatggtgaggcatgcctgtaatcccagctactctggaggctgaggcaggagaatcgcttgaacctgggaggcggaggttgcagtgaactgaaatcgcaccatcgcactccagcctaggcaacaagagtgaaactccatctcaaaataaaatgaaataaaaaatacaaaaattagccgggcgtggtgttggtcacctgtagttccagctactcgggaggctgagccaggagaatcgcttgaacccaggaggcagaggttgcagtgcgtaagatcacaccactgcactccagcctgggcgatagagtaagaccctgtctcaaattaaaaaaataaataaataaataaataaaatattggccagtcaggtttttttctgcttcaagaccccagatatcactcaacccctggcccagtgtctcacacaagtcataagtaggccctgtgaaaaccctcactctcttaaacagtgacttagggtcacgtgtttaaaagaaaattagttataaaatcacccaagcccctcattttcaagactgtgtaaaatataggcacatccaaatcccttggcaatttagtgacaaacctgaaatctgactccagttttttacctaaaccagtgcttactctggattatatcaaaagaaaacactgaggaacacacatgtggattctcagtgaagtgataatgccttttaatagctagatctcttgaagaagtaacaatttgttctgtaattattgatttaaagctgaagcttttgatgactagatggtttgttcctttcttcttctcttcctccttgtaaatatattcattttatcacttacacaagacaaatatgtgtcacaaacggacagtcatataatttttgtttgaaaaacctcatgaggatgggtgccctctagatagccaatttccattcttttcattctaatgttaatgatgttatttaaagttattggatacacagcatcaaatgtcattatttcaaatgacttcatgacacagggttcattgtgtaaggaatatcaagtagaggttctcaggtgttgtccctttaaaatgcaaggggagaaatgcaattgctattttttatttagttacctaatgcctgcccatcatgtctttttgaatttggcccaataacttataattaaaagactcattatccctgctggatgtgggcacaaattcacattatttccatggaagcctgtctgctgtctcactttaatgaaaatttaaaccctttagaatgacatgtgatgcttggaattatttatcttttgtctgagtagagttacaagaagaaagaactcctagaaaaataagtcactatttctttctgcagattcttgtcttccaagtaagcattcttttttgtttgtttctggaaagattgacagagaaaactatgaaagtatcagttagagcagaaaaaaattatggactctcccacctgtgcacttttgacctggtatttggctatcttttgtacatgtagtaaaatatacataacacaacatttaccatttcaactgtttttaagtgtacaattcattgacgttaagtatattcatagttttgtaaccatcaacatcatccatctccagaactttttcatcatctcaaacagaaactctacacctctttaacaatacatcgccgttcccctcttccctaagaaactggtaaccactattctactttctgtctctgaatttgcctattccaagcacttcaaacaaatggaattacacaatatttgtcctttggtgtctggcttattttgacatgtttctgagatccatgcatggtatttaatattatggtaaattttttgttaagtataattccattgaatggatacaccaaagcatctttgatgaatattggattgtttccatttcaaggatattacagataaaactgctgccacactgttggaaaaggctttactggacataaactttgtctcgtgtagatatttagaagtaaaactactgaatcagaatttagatgtatgtcttacttaattagaaataattttcctaaatgattataacattttgtattcgcaacagaggtatatggaaattccagttgtccaatcccaaccaacacatggaatttgttgacatcttaattttagcaaatctaataggtatacagttacatcaccttgtggctttaatttgtatttctctaataactaaaagtgttgaatattttttcatatatttgaccatttgaagattcttttttgcacattactttaggttgaattgttaatcttctaaattatcaatgtgtagaaattctttacacattttaggaaaacattttaattatattttggtattgttaacattttctacaaattggaggcttacctctgtaagttggaggctttggtattgttagtattttatacaaattggcggcttacctttttacttttttaatgctgtcttttgatgagcagatgctgtttttattttgttaaagtcagagttattgattttgaccttttatgatctacttaagaaagttttgtttaccccaaggtataaagatattcttctatgttttactagcttttacatttaggtctgtgatacaccttgaattaatttttgtgtatagattaaggaaggggccaaggttatttatataggtatccagttttgtcggcaccatttattaaaagagttctctttcctcattgaattatttagtgcctttcttgaaaacagttgaccatatatgtatgcacatttgtgtctatttctggatcttattctgttccattgatctatttgtttatccctatggtagtaccatgtggtcttatttgctatatctttatagctcatcttgaaatcaagcagtattaagtactctaatatggttcttttttttccaaaatggaatgtaactatttatatatgtttaaaaccgttactctccacaaatatatatatattatatattctactgagagtacagatctttatatatatgatcattatatgtatgatgagatcattatatgtatgatctggacacccagtagaatctagctcattagattgtccttcacagttaaacaatgcaaagcctatagaagaacattatgctaaatatgtgggtgtgtgggtgactgagataaaatagaaaaaaaggctaaatgtttttggggtacctgctatctgccagtattctgcaaagtgttttatatatcttggcatatttgaatttaattttcacaaaaattctgtgaagtagttattgtctccattagtggatgaacaaagtaagggttagagaagtaatttgttcaaaatatttaactcgaattcctttcatctttgatggtcacagccaatcagtagtcatattgagtgctcatgcagggtgcctgctttgtggttgacagctggattttcagctagtgacaggtttgctatattaacctagtcagttgtcacactgactaaacatacaatttagagcgtagttttaataattctgtgacaactcagtataccttccataaaaaaatgcatctaaaagtacattatttataagtgagttcttgtgaaagaaatcaaattataattcccattgttttacaaaatcattattgagtatacaaagttaaataaaaataacatttatttcatcaaaaaatgtctgacaaaccgagctgctggcattaagcattactagttgtgaaattatgtgttagtcacaaaatcaatttaaataaacaactagattatcatcttgccacccctgaaaacaaagaccttagcacagaatcagatttaatcttcaaatctattacttaccaagaaaacctaagaacacaatttgtttgaaacctttaaacctattactttctaaaagaatctcatggagcactgtgcttgaccttcacaggataaactttgtagatgtcaggggttcaaagcaatttgtttcttatattccttgaatttatctactatatgttgctgattatttccttcatgacagctgtttttacttatgacacacagaaatgcattacattttggagaattgcacttgattctactcttccaatagatattctaatttattatctgatacgtagtgttgggttctaggtgaatcatgactcctagaattattcaatgtgaacactttattgatgatagatgttacattaacatatggtagttgtgttccataagactgtaactattttagaaatatgttcacaatgagacattaatcttttagttatgcatattaatccttataaagttttatgatatacacagaattgaaatatttccattttcatttaagatgaagaaacaaagaatcagagatattgatatttgtccaagcactcacacatttcaggggtccctttttcttataagctttttgtgtccaagctcttataagccttatgtgtccaagctctcacacatttcaggggtccctttacttagaagccttataatactagtaaacactgaaaatgtaaagatatatgagaagtatgagaagtatcattgcaactaaggaactcagagcctagaggactgagacaagcagccaaacatgtaaaagtgaaattgaaaaatgctgtcatacaggtatactaagaggagaggagaacctcattgtatgggtaaattttcctacataaagtgaacccagagcaatcagacagctaatatttattgaaaggaacaatgtctgttatgtgtcatgtaaattagccatacctagtattatttaaccttcacaaaactccagcaaactatcgcaaggacaaaaaaccaaacatcgcatgttctcactcataggtgggaattgagcaatgagaacacctggacacaggaagggggacatcacacaccggggcctgttgtggagtggggggaggggggagggatagcattaggagatatacctaatgtaagtgacgaattaatgggtgcagcacaccaacatggcacgtgtatacatatgtaactaacctgcacgttgtgcacatgtaccctagaacttaaaatataataataataaaaataaataaataaaaaataaaaatgaaaaaaaaaaaactccagcaaagtccattactgttctccattttatagttacagaaactggagggaagaaaaacctaaagaatagaaaagatgaaataaccctttatggttcctcccaggtagatcattttggggtttttcaaaccacagagtcactgcaccatgagttacttcagttttcttccttgtttccagttaatcatattctctgctctaagctctttagtgatagctcatgtcacaaaaggccaggatgagagatgatggttgtgctgataggtgagtgaattcacggagcagagacagaaatgagggagaacgcacccagagaaaggtgcacaggggcttacatcactgggccctttgattggtgtttttgacatgaacacaaagaaaaatatttgaaaatgtcaaacaaaacctcactgattttctaccttgagtagaagaattcaaatgttttgaatgcttaatatttgatcccaggaatcagagaattgtgggaaaagacctccaatttttcttggtttcaattcaagggtgttcaaaatgatatacagtattttacatggcctattcaaaaaattattttattttgaataaccaagggctgataatataattcatgccttttatcttagcatgtaaaagtgctacataagtagaatggtagcataatacacattttaatcagaacaagggcagagcaacgaaggcaatgctttttatttttgttagaggagaatggtgagaaaatataaaaaaacatttagacattcaaaattctagttctagagttaaaaaaaaaaaaaaaaaaaaaaaaaaacaaaacactttttccccaatgtgtaatatgcaatcaaaagcactcatgcctctactgttttccagaagaataaatatgaaagttataattactatgaaagttataattacttttatattagactagatttttttctggagatgtttttaaaaggggaagaaaaatcagataaacttatagacatgctcatatttaaaaataaatgaaaaagccacaaaaacagtcaatagcaagcttccatctttactccttacactgaatattttcccatttctgaggctgcctcaattcatcttatgtcttatcaagaattgtgggatcaacaatcatctctgtgattgtcatagttacaataaattttatatatgaaaagcagaggaataaaagctaccaatcctgggtttaccactggaaggatcagaaggagctgtcccctgttatccaggtaggaatatttgtagacaatgtattaaaaagtgatcttcaaggcataaaaggtcttggtgtcagactcaatattaagtccctcttttcatttgcttgactttttatagctaattaacaatctagccattgtttcccttatctgtaaaatgagactaatactaggttccaactctcatgagattgtcgttgggactaaataagataatgcctctaaatgcacagcacctagaagaggttgtcattatcatttttatcatttaatatttccatttttctctgaggctatggctacactcacaaactggcttgtcagattctatttttaaaaagattgcatttagttgatccatttttcagatatttgtaatagttacagataacattttcacttttagagagtcttgttgtactgtttgcatattgtttaaatgcatagaagtattgttagggcactagcctatgctcttggtgcagaagagccactgaaatgtgctggggagttggaaagtcctcagcaatattacttaccttcttggtaaccgagatctttgagcttctgaaaggaccttagttcccataaacaatttgaccctgaggctgggaagtaatgttattccaggagaatggatgagagtgatcaaaggcagagagatgaggaggtgtaaggtgaagtctaaaggtggggcttgagaaggtggcttggtatcttaaatttgtgactgtcaagggctaggctaagctggagaaatctgatctgcttcaggtcagagtagccattagctgatcaagaaaacaagccgagatgaaagtgacagtcaagcctttaatcactgaactgcaattgtacaaggaagaggttaaccagagaacacacccattctccccagtcctgctttcccccacggagcagcacctgtggagggtcaagtggaccaacatagacaaggggttgtctccctgatgagggagctctgaaccaaagcttcccgcagtttcatggtccctggggctggagaggtggagaggaaagagctaagaatgggaaattactgcacactgagagtggagaaaagtgtcttcaaggttttcttctgcttccgccataaagagaaccaggcagaggtacctctgcttgaaggcccagacaaagaacctctgaatgatggtgcctgggctggaaatacagatgtgcataagagcatggccagccagggcgaatgagtccttgcctgcaacttcctttggaggttgcagtggctgcgcactaagtctggtatggggaaggcaggttccctctgtgtgatctgccaggcaaagcctttttgactgaccatggccaggtctggaaaatcacacatggagttttagctagaagccagactcctcaatagaaggtagtcctatagatctccagtaatagtattcaatcaggcaaagaggaagtcaaattgtccctgtttgcagatgacatgattttatatttagaaaaccccatagtctcagctcaaaatctccttaagaagaggacttcttaaagcatgcgcagtctttttaaaaagttttcctgcttctctttagttgcaacaaaatttttcaaacagggaagaaatggtgggcttgtagtaaagaacaaacaggaagactgagtcttaatcaatcactggtaacaaagggaaactacagcagctgcaaatttcaagggaagacaagtgtgttaaaacatttgatttagaaagtaaaggagagctaattggctagtgtagacctgtaaacaacctacaaaaagacctatatgcttaatgatataagtttccaatgggacagccaggaagatattactttgtagttgttctaatttgcatttaggactaaatgaattggcatacataaaacacctaacacattatctgaaacatagtatttgttcaatcgatatctgctccattttcccaagtaagttgaagagggggtaaatatacaaaatgacctactcagtgactatatattagatacctactactgtaagctttcttcatgataaggtaaggccattgcctgtaaagagtatttattcttattggggacatagaaaatgaaatttaaccctatcatgatagtatctaagaaccaaataaatgcaagaaagtaataggataccactgtcaatgacaacctgttgttggcattaagagtttacacatctctacaaaatatgctggacaggcctgatacacaccatgggtcagttttccaaaaaaaatgtgccagtatcacattatccaatctttcacatactttttataggcactgaataaaagtatccttatcctccctaggggataaaggtgtccagacctatgatgacaagtaggtgtgtgtgtgtgtgtgtgtgtgtgtgtgtttgtgcatctggccagtgaacttgcagggtgcaagctctcacttgtcagtgctcattttgagatatggcagtaccataagtggtaggtgagaggaccccaaagctataaaagttgtctgattatgattcaagaaggaacatttttaacatgttgaactgatgtgactcaaagctgtgagcatttctggattgaaaagaaaagcagaatgatgagaaaacagtcctattttggtttatgtggcatagatgctggcaaggaaggaaatgtcgcttgagctatcaaggagtcgggtcctcattaggagtgtgaagacaacatctgactgtattgtggattttctgggggaagaaagtaaacacctctttcttaaagaagaagaatcatgtagcacagctgggaagacacttcaaaagtgaccattgagaaacatatcaatccaaaccctgagagttcaggaaggaattggtgcttggctgctgtctttagcaatcacgttttaaggatctccttgtgccagacattgaaaatcatttcaaaggcttaccaaggagacaagtattattctctaacccaccagaggctaacaaatgagatgaggcagggactagttgcccctttgtttctgaactgttcacagtagcttccatattagtttaatcaaaggatgtaaacttggcaaactcagagtgctctctgggaagaagaataatttgctggcagattatgtggtttaagaagctgcaaggaaacttaatgctgctgaacgcttggaaactatcatcaggattcaggctctacctctgagattatcatggagtattaacgacataatgtttgtatacaaaacagggtcactcaactgaagtgaagggttaagaacaacagatctgactccccgattcagctgattcctctgaagaaatggaaacataaaagtcttctctttctttttattaaatattttataaactcaacacacaaatcttctcgttagccaaaaaagcaagcttatgaactgtcctcagaatttaacttgacaaatgcaatgccctaaaattctaagcaatcatcaaaagcagcagataggttcccagatgattatgaaaaatatgagtttgcttctgcataatatacacagttttgtatcattagatatcaggctattatactgcagcagatgtaaccagatgtgacggatttttcaattcactttctcttgtcacactgagtttttttctttccaccatggaaaactgaatgttcttcactggaagtttgatactttattatcttaatttcattttataaatctgaaaaatatttccctttaaaatagggatcacctacagaagggatgatgctctacttccagtatgttattgcatggacttacagttaaaaaccagtgatggggttccttttaccaagtagctccatgcaatcctcaggataattttataggatttgaaccaagtgtcctagtacagatatgttttggtgatctattgttatggaacataccaccttaaaacttagtggcttaaaacaataacttattatcacttgtgattttgtgtgttgactgggttcagctgtgtggttcttctgctttatgtgacataagcaaagtctatatctagggatttgacttgactgaagaatacaagatgacttacttgcattgttggcagctgatgttggctttgtcgggaactcatttgggactgttcacttatgtgcctcttatctccacgtggcctctccttgaggcttggacttctcacaatatggcagctggatttcaagagggagtgcaccaagtggaatgggattacacaaagctatggttcattggggtccctttgtagaggctagaagtcacaatttggaatctggtttacatattcctaatttatctttaccccagaatcacagtgtgtgatactgtctatgagatacccaaatttagattgcctatactatattaagtcattcatcctgcctttaggggataaaagcaatatatcctatcattttaaatgattaaacattttaatattctcaatctaaatgtgaattagcatcagtggtggcttagttacttgtgatctttaaattttctcacttctgtctgaacctcagtttcatgagaaaatgtaattagagtcatatatttggatgccagaaataccatcttactatagtccatgctagaagaaatctaagaattcacctaattcaccccctatatttttgcagaaaagaagctgaaacctgtgaagttatgatttgttcaaatcttccttccccatttcaatcagagctgcttctctgtcatctgctttatatattgtgactcaggtataattttatttggaatctaagtccgataaaataaagtttgagaaagaagcagcatagttagtggttaaaagcacagactatgaagacagactaccttaggctgtgttctgtatgctctgtgcctcagtttactcatttgttatgtgtggaaaagtaacatcacctgccctacagagtttttatgtgtatccatgagcttatgttggtaatgtacttggaactgtttctagcatatgaatagaattatgtaagcactggtgaaataaatacatttccttgaagtaatgagagatgcagaaaaacatcagatatgtcggtttacagttcaaattcaggccctaggagtataatgtttctcctttcgatggtatatttttaggcatggagtcagtctccttaagcaagtctaatacagatatctaatatagatttaatagcaaaagatttaacagtaatccttgtgtatcagttagaataccttagactggaaagaacaaaaatctcaacagtcttaagcaataaggagtatcttattttctatctctatgcaaacgtcaaggtcacagtcataccttgagttttacttgtcaggctttcgtagtttagtttatattttcttcatcctgactccctggctacctcaggttgtaagcctctcagagtgactccaggagttggctgagcattttggataccttcacaggtctgcctgggtgtcagctgtcatgctttctcaggttcctacctaacaccatgtctgctactcagagcacacttacggtattgaatagttctccctgagacttgcaatcatcatgacgtttacccagggatgaaagcataggtcccctcatttctcagatttctccttaaccttttggatttctgttactggccactactgttcttagaatcagtcaggaggccaggctttagcacccttctttgagattcattaaaatctaatctatttatatttcagctgaggcaaattttattctcaagcaggggtttcctggctatttactcactttctttcaaatgtaatatttatagccctaactattaactggcttcctaggatttcatcttttacatattaaaatattcagctatcttgtgtgtatgtgggaggaggttgtcagaacatcactacttggatctgagaaagggtcaggcaacaaggaaatgcaatgataaatatctcagctcatatttctttattttatctggactaatgcagtcacttagtgaagaaaaaaaaaacaggtgaattaaaagtaaaaatatatatatttaaataaaccagtacaacaccatagacaatgttgcctcatgggcatttattattaactcaaatatttatgcagaactgctatgagaattcagaatgtatttcaaggccaagttggtcaagaacagtttcccaaagcaggatttttatataggtcatgaataatgactataagttgcatgggaatggagagtagaattgcatggtatgtttttagtagtagaatagccgaattagttacataaagcctgagtattataaagtgcgtttgaacagtagcagatggaacagttgcctggagttgggaattcatggaaataagtccaagctagggctctaaatgcagttagaaaagaagatgaactttagtatagcctataaatgatggttgggtttcatataaggtggtgggaaccaaggaacttgagtgttctaagtaaaggaaacattggagatctagtcaaagaaatgggagcatctgggaagactcagagaatagagcattacacttctactgaagtaaaggctacatggcagagtatcatgagccatgaaactatacacacagtttggacttggaagaggacaaccttagattacttaaaaattggacattgtcatatgttatttttaagaatgaaacctagaagtggctttttcttctgcccacattcaattggccaaaatacggtgagattcttcttgatcctaagtctaaggaagctgagaaatatgacccccttgagtgtccagaaagaagacaccgtgtggtgagtaatattgtttagacatcccataaaatgttgtatttaaaatttggtgcaaaggtggctatttccaggaaaattatatgtgcttataaatagtgaagattatttttacaaaccgacattaaactcctctactttcatagcttactcttacgaataggaaagagcataggagagtctctagcacaatacaggctttgacaattaaagagaaaaataatgtcatggttgctaatactttgtttatttgtttagagtgtagcaggagtcacataaagatgtagattgatttaatgtagctattaaacgtattaaatacatttttatagatgttaatttttaaaattcttactgtttgaagttaaccatttgccaaatgatttaatgcacactcttgagtgtgggcttttgagaccactcttgcttggaaactagtctatttggtttggttacccttagaagttgaagcttcctttaaagtctattgaacttcagaaaattctttttattttcaacagagccacagaattcttttcctgtctttagccctaagtctaagtgctttaatatccgtgtggacatcccatccaatactctagtttcataatttcttgactttctcaagtcccatgacctttcagccatacatgtcaacccattaactgctccatgtctgatctctttgaatcccttggtttagcagaatgtcaggaatgttcaggaatagatgctcaataaatgtttactggattaataaatgggttaatgttgggtgttccataaatacagaataaatatatatgaactgtttgttgactaacagccatcctgctcttgtctttcctaacagcagctctattttgatcatttatctatctcttcccccatctctttatgtatatgttggaagatggtgacccgacctgaacattcagagatgggcccagattaatttatgacaattctggaaatcctaaacctttgtcagtgattacccccagaatggtcctgtgggcatactgtggccaatgagacttaaggaaaggattactagagggtcctaggaaagttcttccccatttttagagggtagcaatggaaaaccactttcactctctcccactggaagtgatcaagaacacatcttgtccttcttcccaactggtagtagctaatttgtgatcatgaagaaggccagattgaggacaatccttctccataggagataaccaagcctggaaaatagcgaagaacgaaagccagagctggctcctgtcatgtgtgacattcccctgccacacctctgcaattccagttcattcagccaattaaacactttgttttttaatgccagtttcaataaagttgctaatatgtaatatcaaaagcaccatcctgatacaaaatctctagccagagaaattggatgatggctttaaaataagaaagtaaaatcatctattcccttattatcccccaaggattgacaatattctttctcgtcagtacataaacacaaaaattgttttaaatgcaaatatctaaataattcaattacattggcaactatgtattttagggggaatttttgtttggcatttaagaacaaataatatatttgcctgaaagttccaattttaccttatgtggatggaaaatcaggatgactgctctggttctgtttggcaccttctagagttagtctgtattcctttcacatgaaaaatgtcagcatagaaattttactgctttcctgctgagtttaacttgctttaggacagctggatcaggctaggcatgaacgtgtaatgtggattcccatagtttttaatgagctttaggaatttacacagtttgcagagttggttcactacattgtcaattttgttacatcatttagtaaaagtatgtgttttttttatttgaacaaacaaatattatagctatcttctagcaaacaaaaataaattgccaatgtatgtgttgtaccccaaagtgacctaggtgggtaccattctaagagaagtctcaggctaaatattgatggaagaggttccatctagtcacgtgtttttgacatttttacaattagggttttatgacagatcaagggctatgtctacgacctcggggtagtagaagtctatttcatgaaaaaaatagggattaaaacatatgtgtaaaattgatgaagataaagtagatattattgccctggaaatgtggggtagaattaattactcatttgttgtaccaaatttgattctgaactgcctaccatctaagacaaaaataaacagtgaattacatacttttccttgtctatggaataataggaggcgtaacagtagaaagaaatgtgttccctaagaaccacattttaaaaaacaatattatattgttagatttctttcttggaaaattttagccaaaatgcaaccatgtggttgtatatagtcagcacttatttcaaccttcaataaaagttaatggcatcatgattaattgtaaatctctgaagacatttataaggaagctaatgtaatgccttccaggtatgttgctctcttataatcagatttttacagtcataaaatcaagttggatttttaatcacagaatactctgctcaaatttaattggattttggataggagtgaagacagaatttgaaaataaggctcttcgtgaagatctgaagttcagatactctatgatgttgaaaagacattaatacatcttaaaaatcagactcttgatgcaattctgcccttaagagagaactgttccgtttttttaaaatggggtggagttgaatttccctcaagaagtagctttaagacatactgatgatcaggttaagtggcttctattactataatttcttaaaggtgaaatattcactatatagattctgtactccacacgggaaattataaagttttaccatgaaagcttccatttcagattaaaaactaatttaaaaaaatgagagattttagtttatttcagttttcttttttaatcaagataaatgactgcaccctgaattgtgcttggggttgcagctctactgtagtttcactctaggacaagtgacttggcaatcagctgtctctaaggaatctgactttctttactatacctagggtccctctgccttgtttcactctgatctggtgtctgcccagctcccagacctacaggcaatatctgcccctagtctcctcccctttcttccacaggcttctggaagatacatccttcctagtgtccttcctctcctgtgttccatctcctacagatttctcaggggtctcactctgattgtctttcctctcttatatctttaactgcccactcagtggcttttttctcattttcactggactgtaatcaactgtctaccatattaacaaaaagttgctttaactgcttactctctgttctttccttcatagcaatatttttgaaaatgttacccatgttcaggatctccacttccgttatctcccttgattcctgaaaccctactatctggcttctgctgcatcattttcctaaacctgttctcatcgaggtcatccgtgacctctatgctgttctttccgaacagatgagccttgttgtgcatggtttaccattcccttttcctggaatgagtttctatatttggcttcttgtccttctctccatctgtcttgcatcacctttgtggcctccctttctcttatagttcccttaaatggagactccttcgtctcttacaccatcatctctagtcttattccctgatctgattattagaatctatcatcggctccccccaacccctgctttctgacagatgttgttaaagcacctctgtgattctgtctgttcaccgcttaaaaattcaccatgatttcctaatgcttacaaacagcctcatcttatcctggcaaggtaacattttccataatcttgttttcctactgtacaatatctgtcttttgttttgaacgtaccttcttacctattccacattggactccgctcacttttgtatttctttatctttaaattagaattaagccatttaaatggaaatgagcattgtgttatgtcctatggatataactaacaataacacaaatatgatttgtgcatttatatgctaaataatcaagaacttgtcaaatcatacctgtaactcaaacctcagctcaaatggagtcttcttacatttatctaattctaatcttttcatttagaataagtatggattctctttgaaatcacatactcttttttgggttttttaaaaagttacatacagcactatcaaattgcgtgtgtgagtgtgtgtgtgcatgcaagtagacactgtaccacataggtataggaatggccaataataagaagaatagatgctgaatatcattagtggttagagaaatgtgctcattgatgaagcaccatatcccaccatcattcatgacttgtcatcttcagtatattgaattaggtgaataaatgcatcctcccatgttttcacttccgtatattgtccttacccctggatatcacaaaacactgactatttccagggtgttgccactacctttttctgctgaggtctcttcatttcaccccactgggctggatctagaataatcccaggaagatgttctctggcatggtctgatcctccacaatatgtatgtatccatgtatgtttcctatatttttaacataaaatcaatcaagataggatctaagaaaattttgtcagatttaagtcaaatgattttgtctaataaaaacatcaattacgctgcttcacactcttatactctgtatttgaccttcatttgttgcaagaaaccccttgaaatactatgtcatttaggtgtttatgtattttgcatgtgctcatttacatactgcataggattttagacgatctacaatacagagacagaataaaatagaaataaagtattacaccacaataaaaatagagttaagaaaaagaatgaccccaaagaaagactgagacttaatcactctgggggtttaggtggttcatgtgacagtatgttgacagaaaaatagttgtcaaattgggtttcataaaaatatcttaaatttaatacttattaccaaaacaacacatttattttcaaaccccaaaaggcaatttaagaatttctagttagtgcaatctaaagaagattcaaacattccatgagaaataatgaaattgtgctagaccaagcaatagcaacaatgaggtgtgaaccatcaccaagcatctttcttgttactactctatgctcagaactaggagaagggctgttcaagattaagggagaagtggaaggcactgagttcaagatgttgacttgtctatctggagagcggagcacataaaagacccaattattgatcaaaacagaacagactaaagccctaagttgggttaaatgagcaatttggaaaaaaatgtttattttcaaaacaatttatggagatagtttgcatttgtataatatattttgactgcatccaatgctgtaattttgctttaacaaaataagtttagaaaactaaaggatagaattataacatgcttctccaaagtcacatagctaatgatataataggattagcacttatatttcctgactcctgataaattactcattttattcatgtaccattttcgtattaatcaaaaatatcattgtatgtcagaatataacatatagatacataaataaatatgaaaaaaatgagcttaattcaaccacagatgtaaatgatccaaaccgagacagtcagtaggatccggaatattttgaaaatctaacaacacagcactctttcttttatatatttctttgtgttgttgaagtttccgtccaccccctcttcctatactaatggtgaatatttattaaaagcttattttatgccaaccatgattttaagcatttcataagtattattttacttaatactgaaaaatccctatggggtagaagttgttattatctccattttgcagatgaggaacaggataggacatgattaaataacttgtccaaggccactcaagtattaaatattagaatcacagcttcaattaaaggtgattctgaatgtcctcttaggttgaaaatgtctaactctaaaacaagtggcgtaccgcctcaaataatgtatagaccagtttggtctcattataacaatactctttattaatattgcccttctctaagcagttgaaaatactctgaaaaaaaatcactaattaactattctgtcaattatgtcatattgtttctatttttaaatggaaaacaacatgagctttctcaaagccagcttggtagcagtttcaggaagaaaatgtggatcaaatttcttagactaagacacctctcatacagacttaaggagttagattgaaactaattataaatccatgacatttttatttaccttagtataagaaatcatcccttcctccactcccagccatgcatgctattctacatgactaatgagttaatttgagaactgatgcttcatctggaacaggtgatgaagggtatataggaatcagtgttagatggcaggtgtctaaacaatgcctgattaaatgaagtgtgttttccctccaatgtattagcataaagtgtcatatagcctcagaagtcaaaaacatcaggagagttgtaaaagctaatgagccaagggatgtttccagggttctgccattgtaaaaaagaatgattatttaatgtgtgtggggacaaccatatttatttttgtatcaagcaaatatcctcactcttagcgtaaataaaaagtcatctgagcaacagggctccaagctgccatggttctttgctctgaaatgataactttttcctggaaaggtagggaatccactcagcacacttgaaagaagataatgggtttcagattcgcctattactaaagtggtcatgaatacctgggtggggtctgcctctgggatggtatcaaccccaatttgtactggacttctttagctagttttcttcagaaaggtagatcccagagctatcagcacccagagctatcagcacctgaatcaccattaaaatgcaaattcagggcccacttcagtcccattgaatccctctttcaaagtataaagatgaaatctacattcctgggaatacttgtccttcttccctattcctaactggttcttaatcaggggtgtgacactctataaaaatatacatgccaagcccatcacacccagttctattcccatgcaggatcctagggaaagtttattagcaggtgcatttaaaataattctctagtgattattctgaatgtcccctttcgttcagaattgtcctggatcttattaaacaagtggtcttaaacctcactcagggtgagatggaatcatgcgtaggtataagcattatttgtgagattattaatgctgtgcatccatcagcaatatttctatgaaacatagtaatattgttgcaataagagaaagcatataacatatcctaatttaacacaccttagggactacatataggacaggcatttccccctaaattggaagactttagagccctgccctattctagtctagcccagttgttcaggtaactgcaggttgacccactcctctattggaaacaatgagtcagctattatgtccacgtctgaaagtgctttcctgttgacacccaagatattcccagggatcagctgggaagcattcacttctagcttcctgggtattcctatcagaatcccaggcctttcgggcccttctgtccacttgtcttggatatgtggggaggttttttgtttttttttctattattattatactttaagttttagggtacatgtgcacaacatgcaggtttgttacatatgtatacatgtaccatgttggtgtgctgcacccattaactcttcatttaacattaggtatatctcctaatgctatccctcccccctccccccaccccacaacaggccatggtgtgtgatgttccccttcctgtgtccatgtgtcctcattgttcacttcccacctatcagtgagaacatgtggtgtttggttttttgtcttgcgatagtttgcttagaatgatggtttccagcttcatccatgtccctacaaaggacatgaactcatccttttttatggctacatagtattccatggtgtatatgtgccacattttcttaatccagtctatcatggttggacatttggattggttccaagtctttgctattgggaatagtgccgcagtaaacatacatgtgcatgtctttatagcagcatgttttatattcctttgggtatatacccagtaacgggatggctgagtcaaatggtatttctagttctagatccctgaggaatcgccacaccaacttccaaaatggttgaactagtttacagttccaccaacagtgtaaaactgttcctatttctccacatcctctccagcacctgttgtttcctgactttttaatgatcaccattctaactggtgtgagatggtatctcattgtggttttgatttgcatttgcctgatagccagtgatgatgagcattttttcatgtgtcttttggctgaataaatgtcttcttttgagaagtgtctgttcatgtccttcacccactttttgatggggttgtttgtttttttcttgtaaatttgtttgagttcattgtagattctggatattagccctttgtcagatgagtagattgcaaaaattttcttccattctgtaggttgcctgttcactctgatggtagtttcttttgctgtgcagaagctctttagtttaattagatcccatttgtcaattttggcttttgttgccattgcttttggtgttttagacatgaagtccttgcccgtgcctatgccccgaatggcattgcctaggttttcttcagggtttttatggttttaggtctaacatgtaggtctttaatccatcttgaattaatttttgtataaggtgtaaggaagggatccagtttcagctttctacatatggccagccagttttcccagcaccatttattaaatagggaatcctttcctgatttcttgtttttgtcaggtttgtcaaagatcagatggttgtaatatgcggcattatttctgagggctctgttctgttccattggtctatatctctgttttggtaccagtaccatgctgttttggttactgtagccttgtagtatagtttgaagtcaggtagcatgatgcctccagctttgttcttttggcttaggattgacttggcaatgcggactcttttttggttccatactaactttaaagtaggttttcccaattctgtgaagaaagtcattggtagcttgatggagatggcattgaatctataaattaccttgggcagtatggccatttttacaatattgattcttcctacccatgagcatggaatgttcttccatttgtttgtatcctctttgatttcattgagcagtgttttgtagttctccttgaagaggtccttcacatcccttgtaagttgtattcctaggtattttattctctttgaagcaattgtgaatgggaattcactcatgatttggctctctgtttgtctgttattggtgtataagaatgcttgtgattttttcacattgattttgtatcctgagactttgctgaagttgcctattagcttaaggagattttgggctgagacaatggggttttctagatatacaatcatgtcatctgcaaacagggacaattggacttcctcttttcctaattgaataccttttatttccttctcctgcctgattgccctggccagaacttccaacactatgttgaataggagtggtgagagagggcatccgtgtcttgtgccagttttcaaagggaatgcttccagtttttgcccattcagtatgatattggctgtgggtttgtcatagatagctctgattattttgagatacatcccatcaataactaatttattgagaatttttagcatgaaagttgttgaattttgtcaaaggccttttctgcatctattgagataatcatatggtttttgtcattggttctgattatatgctggattatgtttattgatttgcgtgtgttgaaccagccttgcatcccagggatgaagcccacttgatcatagtggataagctttttgatgtgctgctggatttggtttgccagtattttattgaggatttttgcagatgttcatcagggatattggtctagaattctcttttttttgttgtgtctctgccaggctttggtatcaggatgatgctggcctcataaaatgagttagggaggattccctctttttctattgattggaataatttcagaaggaatggtaccagctcctccttgtacctctggtagaatttggctgtgaatccatctggtcctggactttttttggttggtaagctattaattgttgcctcaatttcagagcctgttattggtcttttcagagattcaacttcttcctggtttagtcttgggagggcgtatgtgtggaggcatttatccatttcttctagattttctagtttatttgtgtagaggtctttatagtattctctgatggtagcttgtatttctgtgggatcggtggtgatatcccttttatcattttttcttgcatgtatttgattcttctctgttttcttctttattagtcttgttagcggtctgtcaattttgtagatcttttcaaaaaaccagctcctggaatcattgattttttgaagggttttttgtgtctctatttccttcagttctgctctgatcttagttatttcttgccttctgctagcttttgaatgtgtttgctcttgcttttctagttcttttaattgtgatgttagggtgtcaattttagatattttctgctttctctggtgggcatttagtgctacaaatttccctctacacactgcttttaatgtgtccctgagattctgatatgttgtatctttgttctcgttggtttcaaagaacatctttatttctgccttcatttcgttatgtacccagtagtcattcaggagcaggttgttcagtttccatgtagttgagcggttttgagtgagtttcttaatcctgagttctagtttgattgcactgtggtctgagagacagtttgttataatttctgttcttttacatttgctgaggagttctttacttccaactatgtggtcagttttggaataggtgtggtgttgtgctgaaaagaatgtatattctgttgatttggggtacggagttctgtagatgtctattaggtccacttggtgcagagctgagtttagttcctggatatcctttttaactttctgtctctttgatctatctaatgttgacagtggggtgttaaagtctcccattattgtatgggagtctaagtctctttgtaggtcactgaggacttgctttatgaatctgggtgctcctgtattgggtgcatatatgtttaggttagttagctcttcttgttgaattgatccctttaccattatgtaatggccttctgtgtctcttttgatctttgttggtttaaagtctgttttatcagagactaggattgcaacccctgccttttttttgttttccatttgcttggtagatcttcctccatccctttattttgagcctgtgtgtgtctctgcacatgagatgggtttcctgaatacagcatactgatgggtcttgactctttatccaatttgccagtctgtgtcttttaattggagcatttagcccatttacatttaaggttaatattgttatgtgtgaatttgatcctgtcattatgatgttagctggttattttgctcattagttgatgccgtttcttcctaacctcgatggtctttacaatttgggatgtttttgcagtgtctggtaccagttgttcctttccatgtttagtgcttccttcaggagctcttttagggcaggcctggtagtgacaaaatctctcagcatttgcttgtctgtaaagtattttatttctccttcacttctgaagcttagtttggctggatatgaaattctgggttgaaaattcttttctttaagaatgttgaatattggcccccactctcttctggcttgtagagtttctgccaagagatctgctgttagtctaatgggcttccctttgtgggtaacctgacctttctctgtggctgcccttaacattttttccttcatttcaactttggtgaatctgacaattaagtgtcttggagttgctcctctggaggagtatctttgtggtgttctctgtatttcatgaatttgaatattggcctgccttggtagattggggaagttctcctggataatatcctgcagtatgttttccaacttggttccattctccctgtcactttcaggtacaccaatcagaagtagatttggtcttttcacatagtcccatatttcttggaggctttgttcatttctttttcttttttctctaaacttctcttctcacttcatttcattcatttgatcttccatcactgataccctttcttccagttgagcaaattggctactgaggcttttgcattcgtcatgtatttctcgtgccatggttttcagctccatcaggtcctttaaggacttccctgcattggttattctagttatccatttgtctaattttttttcaaggtttttaacttctttgccatgggttcgaacttcctcctttagcttggagtagtttgatcgtctgaagccttcttctctcaacttgtcaaagtcattctccgtccagctttgtttggttgctggtgaggagctgcattcctttagaggaggagaggcgttctgatttttagagtttccagtttttctgctctgttttttccctgtctttgtggttttatctacctttggtctttgatgatggtgacgtacagatggggttttggtgtggatgtcctttctgtttgttaattttccttctaacagtcaggaccctcagctgcaggtctgttggagtttgctggaggtccactccagacactttttgcctgggtatcagcaggagaggctgcaaaatagcgaatattggtgaacagcaaatgttgctgcctgatcgttcctctggaagttttgtctcggaggagtacctggctgtgtgaggtgtcagtctgcccctactggggggtgcctcccagttaggctactcgggggtcagggacccacttgaggaggcagcctgtccattgtcagatctccagccatgtgctgggagaaccactactctcttcaaagctgtcagacagggacatttaagtctgcagagttttctgctgccttttgtttgtctatgccctgccctcagaggtggagtctacagaggcaggcaggcctccttgaactgtggtgggctccaccctgttcgagcttcagggccgctttgtttacctactcaagcctcagcaatcgtaggcacccctcccccagcctcgctgccaccttgcagtttgatatcagactgctgtgctagcaatgagcaaggttccgtgggccttggaccctccacgccaggcactggatataatctcctggtgtgccatttgctaagaccgttggaaaagtgcagtattagggtgggagtgacccgattttccaggtgccatctctcacccctttctttgactaggaaagggaattgcctgaccccttgcacttcccgggtgaggtgatgcctcgccctgctttggctcacattcagtgtgctgcacccactgtcctgcacccactgcctgacactccccagtgagatgaacccggtacctcagttggaaatgcagaaatcacccatctcctgcattgctcacactgggagctgtagactggagctgttcctattcagccatcttggctccacaccctcgtgaggacgttttgtgtcctcttctcctgcactagcatcaggggagagaaatgctgtcagtgactcagctatttggccagggctcagtttcaataaggagctgggtcatacttatctctttcccctcctctgtcagtcagatcaccacaacttaatctgataggctcactgttcctgcttgttttgaggtgggcaggcctatgcatacctgtctccaaagtctgtgaaagctgagaagccaaagagagtggctatcacgccattctcctgcctcagcctctccgagtagctgggactacaggtgcctgccgtcatacccggctaattttttgtatttttagtagagatggggtttcaccatggtcttgatctcctgaccttgtgatccacctgccttggcctcccaaagtgctgggattacaagcgtgagccactgcgaccggccatttatgaataccttcgtggggtctgcctctgggatggtatcacccccaattagtactggacttctttagctagtcttcttcagaaaggtagatcccagagctatcagcacctgggaacgtttctcagaagaaatgtttaatagggacttaccaataaaagccatgtctgtgtctcaggctgtgtgagagaagatggtggatttccatcagaaaagaggggaacaattgaagcacaataacagaaaagttgttttatctaagagcaagatctatagtaagtttctgttcttacacaaagaacagcagataaactggaaatcttagaggctttcctggagcagaggctaatcagaagccaacatggcagattagcttccaagacagagttgctttagcctacacactactctatccttctgaggctatatccccaccccattctaaacttatgtgaatgtattatacccatttttcctcgtagcctaaaatcaactctatatacagaccaaatgctattttctgcaaattctaatatttgagagtccattctgtggtggtctaactcatgactttctggcataacttttttctttcaacatttggtgtagataaaatgagttttatataattcattgtccctggatcctcctggccagacatttaaagctaaactcccatctgattctgaagagcttataatactttcagaagagataatgtttgctaaattttcatgcacatatttaaaacatgcagtgagcatagttcctcagaaaggtgatccaactcaaaggttatataatttcatatgtgttctccttctgtttatataatgaaaaacactgttaaattctgaaggataaatagaaacccttttctgcatagacattctcccttagtctttcatcagaggttatttagtttttctgaattttgaaggaagattaaggaattttaatggagggttgaaaatggcaaataatcacaagcatcttcaaaaggccaataaattcatttatctgccagctaataaaatatttaactccatttatggctagaattaatttcatgatattttcaggaaatgagaagagttgttcatttggaatgaaacattaaaaatattagtgattttgtaaacaactttaagaatacaataagcatatctgtagatttattggtctttcattggtaagcattggcaatgaaagttccaataagaactggatttgggggtatggggaacaaatatggccatctagcaaaagcaacatgaacatatgtaaatgttaaaaaatcatctcttttattctgaatgaattcaacaatatgcagagtgaataattttgttttgttttattttattttttgagacagagtcttcccctgtcatctgagctggagtgcagtggtgtgatctcagctcactgcagcctccgcctctggggttcaagcgattctcctgcctcagcctccggagtagccgggattacaggtgcctgccaccatgtctggctaatttttatatttttagtagagacagggttttgctacattggccaggctggtctcaaactcctgacctcaagtaatcctcctgcctcagcctcccaaagtgctgggattacaggcatgagccaccacacccagcctgaagtgtgtaattttaaaatgtatttctatatcctaataatttaatgttttatgcattatttttagaaaaataaaattttattaagttgattttatgaacagaagtagttattataatggaaagactgggaaacattattaatggtgcatctaaaataaggatgcttgaaaacacacaatgttttctccaaacttttttagacataaatattacggaagttctgtactaaagttgtgcaatatagttttggttttgcattataatatttaaaatacatgtcaatcatatacttactggaattagataccctgttagtagctctaaatattacttttatatttttaaatgattttatgatatttataatattaatataattttgtaacaaactctgaccctactgatattatatccttctcaatttgcagttgtttcatcttggaacctttttattttttaaaggaataattacaatcaataatgttttaaaattcctataaggcatagtttctgatttatgtgtaatataatgattcacaaagcatattttcaaagaagggttaaatatattaggaaaattctttgttctgtattttgctcttacaacccacaaatcccatcagcataggaaacattctgagtctaatggtaatacagcctcttacattgttggtccttacatttcataaagtcctgtcaacatgaaattattttacagggaattttgggaagcagtatttaaaagaaacacagggctaggcgcggtggctcatgcctgtaatcccagcactttgggaggccgaggcaggcagatcatgaggtcaggagttcaagaccagcctggctaacatcgtaaaaccccatttccattaaaaatgcaaaaattagccagacgtggtggcggctgcgtgtaattccagctactctggaggccgaggcttgaaaccagaaggtggaggttgcagtgagctgagattgcgccactgcactccaccctgggcgaaacgagcaaaactccgtctcaaaaaaaaaaaaaaaaaaaagaagaagaagaagaaagaaacacagtggtacctcctaggcaatccccatgcaatgctcttggcttagagtttaactgtgattaacggtcctcttccacaaggtcagagatggagtcagtggcccctctggttcctttctaaatttggaaaaggtggtatcagtctttcaggttcagtggaagacagacctgctgctcagcgtttagatcattgaaaagtagttgttaggtgattctccctttaactcaataattatcatcattttttttgctgaaaagaataaggatggaaaaaatcagaatggacagaacaatatgccataaagtcaagcagtgcggtagaagcatcttcacatcctgaaaacaaatgtagctactttcaaaaaagattcttgagaaacactgtgtaatatttgaagaaaaaagaatcttgctcacaatttttgcttttggacttcttgttgaaacagactatatttttattcagtgtttgctgagtgttttcctgttcacataatgcccagtatgtgcccagaagtgagctgtgaaagcaaccgtacacttttgctagtaggaaagtagctccatctcagctaagcatactccatgtcagaagcaaccggatgacattaaggatgcagtctatgggaaataatgtgttcttttcttcccaaatgctagctaatgagaaccaggtccttggcctcatcagcactaagctctcttagctgtaacctggttcagtattacagcactaagctttcttagctataacctggctcaatattactaatagaggtgacagcctctaagacattagaggagaaaaggtaaacttttttgcatgtcataaataatttctaggtgatgagtttctatcataaaagtgtactatgcattggagaaacactccatgtataaagaaaacctacaaaatgtggactgatcattatcaagccttaaacaaatgtgatgattgacagcaaaagaggttttctctgctatagagaataatgtcttgagaatttggagaccatttttattttccgtttccctgttagttttctgaatcttaccctaatcaagtttgacctatttccttgacctttcaatattattggggaatgaaaaatgtaaagatgcttacatggcatatagttccagaaatcaacttatcatggaaaaatgccaatgcaggataggatatgcagatgatgcaacagacattctcagctccgatctgttatctagggctttcagaagcttacagggtctccttgccatcttatcagaaccagaatttcaaacttggaactcatgatctttctcataaaattagctactatcccctgaagtttactttctgttggtgatacctctgttcttcaaggttcccgttttaaatggattgatgcatcttccaaggatctctttggtttacccccagcttttcaatccttgtttcctggcattctctcttgagctctactttaagccaccctgcctgtggacatatcatgaaagtttctccctctgggccttgtttatgccctttcctgctctggggtcttcctcacttcttccaagccatccaaatcctaaccaagcaccaggtcagtgacctcatgaatccagaattcctattatgttttacttcttttgtcaacatcactacacatttcatacctgatttctcattatcttgtttcttttctgtgtacctctacagctcaacactgttatcttgctgtgctgtcctagggacactgctatttcaatcctcatacattgtatgggccatgtaatagatgctctataaatatttaaaaagacagcagttggaacaacttggaggagatcatctcacttaatacatttttttattattgttgttttatgatttttgttatttgattttgcttttttcaatgcctggggtaaaatgagagttcaaggtgaagtaatttatttacaaacactcaaagttgagactcaacccaatgcctttgatcccttccctgtgctctttctttcttttttaaaacagcgttgttgaagtgtaattcacatgccataaaattcactcttttaatgtgtgcagttcatggcttttagtatactcatagaattgtgcaaccatcaccacaatctgattgtagatttttattatgaatctcttagcagtgccctcctcacacttcagccataggtaaccactagtctgatttctgtctctatgtatttgtgtattctgaacatttcatataaatgaaatcatactagatgtggtctgttgtgattggcttctttcatttactgaaatgttttaaggttcatccatttggagcacgtgccaatattttattccttttgattgctgcataatattctattgtatagacataacatttcatttatccatccttcagatcacagatgtttgggctgtttttacatttttactattatgaagaatgctgctatgaatatttatgtacaagtttttgtgtaaatgcgtgtttttgtttctttttggtagacaactagattaattgctgagtcatgcaataacactatgtttaacctttatatacacacacacacactctctctctccacacacacacacacacacacatatatatatatatatagagagagagagagagacagagacagagagacagagacagagacagacatagacacagacacagtcttgctctgtcacccaggctggagtgcagtggtacaatctcagcttaccgcaacctctacctcctaggttcaagcaattctcctgcctcagcctcttgagtagctgggattataggtatctgccaccatgcctaactaacttttgtatttttagcagagacgaggtttcatcatgttggccagcctggtctcgaactcctgacctcaggtgaccctcctgcctcatcctcccaaagtgctgagattacaggcatgagccactgtgcccggccaatattcttttgagacagggtctttctctgtcacccagggtagaatgcagtggtgcaaacactgcttactgcagcctcaacctcctgggctcaattgatcctcctagaaccacaggcatgaataatcatgcccaactaattttttttagttttattttttgtacagacggggtcacaccatcatgcccaggctagcctcgaacttctgggctcaagcaatcctcctgacttggtctccccaaatgctaggattaaaggtgtaagccaatgtgcccggccacatattcgttattgttaatgagaaatggtcagtactttatgtttgggacttgtcaagttgagtagacataaatacttttaggtttgtgaatagcaggtttccaaggtttaatatttaataaaattcaaacctggtacagattgattacttctaaaggagatccttttgtattataactacaggtataattattttgcagtcataaaaagtaagcacttcaaagcactaaaaaattcccccgtgtgagcaccttattgcaaacttattactttggggggtagctgagagcttccattgtatctgaaatatttgatttccacttgaacacaggcagcaaaaatgagtttatagaatgtctctgaggtaaatttagccaaaaacaagattaatattaagtgttgtctctggctttctttcaaaggaattttttctcagtgggaggtcatttcttctgtaacctaaagcatcatgatttttacagatttgtcaaaaaatgttagcaattcaaactaggcaatctgatttacacatacttatgtaaatagaacatgtaacagatatgttgagtttaaactagcctcacatagatttggggaggaaggaaattatgctttttcacaattaataaaatttaaaatcacaagaattatcactttatttggcttatagaattaaaattaagaaatattttttcttcctttcacccagagaaatgttaagatgaaatgccttcttacatattcaataagcttctctcaagaatgtgtctaatcaggacttctcagccttcaattttctcatttgcaatgctattctcattcccctttattccctttgttatttggccttgaaaaaaaatggcgagattcatatctctgtccaactgctgaaatctcacaagtttaaaatggcaatgtttttatggaggaatcgtggtgctgtcacggtgatttcagaaagccttacttctgttttgctctctctcagtctttattatgaccacctgaacaggatgaggggccaaagacactgccactgtgtgtcagctaaagagcagaggactgggcttggcctgcagtgaggaactgtagggaatgaggatggatgagtggacaaggaactagggctgcaaagaccacctttgggatagaaggcaattgctttttatagagtgtagtctccaggtcatttacactagaaatgtgtttttagaggaaagaatattgtccattagtgaacagatggtctcagcaggaaaggcatctcaggggcaagttttactcaagtttagagttcacaacaattatcctgatagatgtgtgtgcgtgtgtgtgtgtgtgtgtgcatgcacgcgcatgcctgtgggtatatgtgcacttgtgcctgtgcatatgggatttttcttttagcttgcttgactggaatgataaaataactagcgtattctttatttatttgctataaaatgataaaatgtggttttaacaaaaaatgttttaaaatattgttcattgaactttaacaacacacatacacgaatttttcttgcatttgccaaatcaaaacaggtttcatcctggtgttcttagtttaacaacaatggtctattttacattaaagcctattagtcaaccctgagcacaaaactccatccaaggtggtgactccaactatgacaccccctctccaccatatcaacctagatcttaagtgaaaaagtacaggggaaaattattctcctgcatgcaaagaataggaaaagagaaaggcatagaatgttaagaataatagtcgtaatattaatggcaattacattaatcattgtctttcaagtacctgttttgcgccaggcacaatgctaagtcgtctatgtatattgtattgttgtttctcctgatagctccatgtggtcaagactattattgaacccttttggtagacaaggaaactgaggcaaagaaatgttaaggaacagtcccaaagtgcacagctagatgaaaatctagaaattgcactctagagtctggttgctctagagtcagtttactcaagtataatttctggattatatgatatctctccgataagatgagtgtttcctagaggtgagccccctagagtttgggctggagaatggatggcaataggatagattaaggcttggaatgttgacggagaaagagccttctagaagagaaatatactatactttaaggcagggtttagaaaatgcatgtggtgcattcatgggataatgaagaatccaggctgctccattgggctgtttatgctggaaacactagttggagggacaggtagttatgcaatttgtagtagacaacctctccctagcaaggtagaaaagcaagagaggtaggaacaaaattctgagtttttatttttccatccatattttaagacagatgcacaatatctgcagtttgaccacttacctcaaaagagtgctacccataagctcctggctccaagaatgcttttgttcaaacataggaggggatttgaaagatgctttgaagatggtggtctgaatattttaactatagtaaggaattcctagtcaatttttgttattctttgtttttgggggagggggaaaagtgccaaatattttcatataggaagaatagagtattcaaaatctttctaaaaacctaattatatatgattagttgtaagattttaatcctagagtttggacagatctcaacattaaaatgacggttttggaaaattgtttaaagatacaaatgtcaatttgcttcctgggattcatatactgggaggttttaccctaatatgtttagaaggcagaatttggaaacaaagggctccctacttcttacagttttactttgtacttcatgatgctgaaaatgtaattagcccctcgataccatatggcacattggtacccattgttatctttttaaaattatgttttagggccctaacctatgtagattttaactctgcagatttatccaaagtacttcatcttatggcatgattttaaggctttattcataatttttacttattattaagagaaaactctctaggatcttttttctagtataagcagattatatttatagagtccttactatgtgccaggtactacttattaaaagtacattcaactggcttaattctcacaatactttgtgaggtaagtaatattacccattttattgttaaggcataaaattttcaataactaccacaatggagcatagctattacatagtggagctcagtgtgaaatcaaacattttggctctagagattttgctactcaccactgtgctatgctacaagggtaaggttaaacccacatatcagcctatataatactagagtgttttggttaataagtaggagcactttcttttctacaatctagaaaagtgctattgaagggaggtttcctaagtggtctctgaccatagatacagatgagatatttaaaggaggtttttaactacatcactatgtaatgagtggaggaagcaatatgtaatacttatctattattgcataaaaaattaccccaaaacttactggcttaaagcaacaaatatacatcatctgccagttcctatgagtctggaatccaggtatgattcagctgggtgcctgtggctcagaatctcccacaatgctgtctcaagttatgaataggagctgtgttttcatctgcaagtttgactggggaaggtctgcttcaaagctcatacatttggctgttggcaggccccaggtactctggctgttggacagagacatctgttccttgctccatggacctctccatagggcaggtcatagcaaggcatctgaattccctcagagcaagccagcaagacagggaaactcaagccggaagctatcttttgtgacctttttgtaaccaccactttttctgtattttgatgattaggagcaagtcagtaggtccagccatggggaggggattacacaagagtaaggggtttacacaaaagggatcactgggcaccatttttgaggctgcctaccagcgtctccccttgtcagcctaagataagttagtattgctatgaagtaataacagatcactgaatgtattgtcacctgcctatttttatagttaatagatacagcaacgtattttgtatttaaagcttctttttaggaaaaggccatttgtgtgccctccattaacttcacaccaatttcagtcagtttgctgtgttgtgataagatgtttcagttacaccctctgtgcttcagagtgactggtccttcattagagggttaagaaacttagtattttggcagaactgagtaatttgtttcacccagtggttaatttaggcaagcaactgacttgactgatctgagtccttttagtacatgtctgtttagctgagttaatcagatggagtattggtttagcattaggtcagggaattctgaaagtagaatatgtattacctagcctattttccacatctaaaataaggaaatatataggatttattaataaaatatttgagaaaacaacagaatatacattgtatttttctatgtaattttgtgtttgatgagtaatcattctcattagagaatgataccagttttgagttttgaaagacatcttttctcacagaactatcaattgccactctttgccagaagagtttttcaaagaggtatgcgtatttctgctagctatcattacaaaatgattctgagttatagtatgaattggtaatggatctacttatgacacactggttcacatctcagattgtttttatcttctaatggaagtcattcattccttcacatagtcacttatatattcagtaattatttgttgagtgtctactctggaccacacagagttgtaagcattgcaatgtaatttcgtatatttttcaaaatctcattgtaaggaaaagagtgtttagcacctctcactggattgaggtagcaatgtttacttcttaatatttttccttagaaaacaagcttcaaaaaattgtgttatcctttgattgtttcggaaaaagctgttctctttaaatagcatttaaatatcaccacaaattgatatatgattctcgaagaatgaagcttcatatgaaaataaataaacagctcaacacagataaagaaatataaattaacctagtgagaaaagaacacaattattggctggatatgaaccttgattatgagtcagtagcaaacactaaaagagggaaaatgatccattattcaatggaaataatttagcttgattattcctgcattttcaagagcagtaagatcagccacatgcagacaagtgggacagagttgttgtgaattaaatgcagttgtattgctattatatttaagacatcacaatctcatttactcccatggagcctgaagtatgtgctcttatgaataataatcttatgatttttttcataatatgaaattatacatgagcctctgaattttatttcagtcaatgaggtttgtcctctttttgttcttgccattggtgattgatataatcattcatatgtgtgtgcaaaatgacctgattcatcatgattatatatattaataatggctatattgaataactttagccaaaggaaatttgattggtaggattcacaaattatgaaatgtctaggatttaaagaacatatatcattaaaatcctttgaaaaaacaaattatccaattcatagtccttcggtcaagaaaattatttgatactcagttccactttaaaaattaaatattaaatttcatgagtgttgcctgaaagctatttgcaaataagttctgagtttgtgttattacaatgggtttccatgccattgaaaatattgttcttctacacatgacatctttttttctcataatttatctccttaggtcctatctctttctgctgctttttttttttttaccccagttatttcaatatgaatcttcttctcaactcagcaacacttcagggctcactgctcttgtcccagtgagttatctcaattgagcccgcgcatcacacatgtgaccctggcacatctgtgaggcaccagcacatgtactccacagccatgtagaagcagctcatgttccctgataatattgtgtagggagagaaatcaatagggccttaggcgagcctgaggaaaagagttaattaagcagtgtggaaaagagaagcatcattgacaagcagcaagatacatttaaaaggaatttttcaaatgtattgaaaacaaaataggtgaaggagggggcaaaacaggaggaaactatgctaccttttctcagtgacactatcacaaatttatttactttttcaataaattgcatatatatattcacacacaagtacattcgtaacttaaaccctctttatatttcagtgtagacaacatgtgagagggctgttatcgattctacagaagaatcatggcatgttatatcaatcatgtttcatgtgcaggagctactcgtagggattgtgattgttgctacatcatccagaatctcatagtcaagttgcacttttgccccatcaaattccacttttcatcctattaggaacaactttgctatgtaagcagggtttttatgtaaatattttaaattgaatcaattgcaatatgctgtcatgacatctgatttccaggtatgaagtaagtgtgcagtatattgtggacatcacacgatttgcctctctgttctttaccatgtgtctcatgatgccactgcaagttgcataggagaaaactgaacatatctactcctagaattagattggttttttagaagcaagattttcagggaaataaggaggaattcgtttgaaaatcccagttgaacacctattcgtattacagatgggtttatttcttggttttattcagaaactaggggcctggattgccacttccttttaaagcaagctgtgtaggcccttattgatcgaagtgtggtctcttggccagaagcatcaggatcacctaggatcctttagaaatacagtctcaatcttcagattagtcaaactgaatccaaatctgcatttaacaaggttccctaggtgattcttctgcatattacagtacggggaagcactgagcctcagacagttgcattttgggtagggcatatgtatttgtttcaactataactctcaaatcttgtcctctagctgtaaatcccaactacactgaaaattttaaattgtcaatcaatgcaaataaagataattaatatttggtgcctctggtgcatgcttaggatagtgaggaatgcacagagattaaaagaatgatgtcagctatgcagaagagtggaattcgttaagaatgtgattgcctcccatcttaagagataaaacatgcattgaaaaaactattagagaacaacatatacccatatttagccaactgctagattgagcttaaggctattactgctttgcaagtactaagaagataaaaatcattgtacaaaaattctctaagaatttttgccttttcttcttctctcagtcatcactgcaattatgataaaattatactgacctttggaaaactcagtcaaatatatgatctccactggccctgaattctacagtctaactaaacgtgtcacagagagagaattagatagttctctttaattggttttaaattggtagtcctttcactcaacattttttgctggcttcctttagttcactgtattacagtataacacagaaaaattggaacaaaaactttttgccaaaaactatgcattcgtagtcaagtaaacaaacatggctactctgagaaattggttataacaatatagcaagcaacaacccactaaaaaaatcaagcagcactaggaaatatctcttatgtttaatttcctgttggttttgctattcaggtaggtctggttttttgagagctaatgtggtagtctatacaaaagggtcatcgctgataatgtgtataaccaaatgttattgactataatttttttaaaataattttgttacaatttttctgcctttatattatatcagcaatacaaataaaaacactcctttagagttaaagcaggattttttaacaaacagttattttcaggccattagtaaaatataattttcaaaagttaaaaatatgactctcataaatataaaatgaacatatcaaagattttattcatttcattaattaatgacagaatgaggaaaatggcaagcctggcatttattggcactttaataaaaaattagaatatgtttgctaggatagttatgaaataggctaatatccattaacagtaataaactatcaactttgacatcttctcagctggacaggaattatttgcatttctaatagaaaatctataacatatagcttcactcaactggggttctttaatcaattgtaaacaggctgcttaacaaaatacattccctagataattaaatcatctttgtatggacctgataaatccccatggacaaatatgtcacctttcttttttccttattttcacattttacatcactacctgtatttagaaagatcacatattaattctagttctcattccattgttcttgctttctttagattggagtcaataaacataatctgtttctaaattctctggaaaataagcacaaaaccaccttactctaaatgtccttctttccttactgacctttccaggtagggcattcctaatgccatgtgacctcataaaatcatgggctagctggaatttattaatgtgacttgagagatgtttaaagctgaaccagtatgattaataatcatgcagatggaaatgaagggaagggtctgagatatatctagaaagtaaaatccaagggacctcatgccttcttgagtagaaaggagcttgggagaagaaagagccaaaattgacagtgggattacatgagaaataaataagatctttgacatttgggtttaaggtagtaaagaaacattgaatttaagatattgatgaagcaatgagaaattttactatggaacttgggtcagtgtaggaaccaggaccatagagtcacagggtacccattgatggtggtacttgaagccatgggaaataatttaaaaatagtcaccaagagagggcatcctaaaacaaaaccaacaaaatcagtattaggtaccagagaaagaagaggcaatgaagaaaagatagtcagataagagaattgaaatgtggcagtgtaagtgcatacaagttttttgaaatgtaaacaaataaatatagtactctcaacacatatacaggaatacattttaatttctctaagattaatattgtgtgcctctttccaaattactacaaacagggccaggcacgatagctcacgcctataatctcagcactttgggaggccaaggcgggaggatcacctgaggtcaggagttcaagaccaacctggccaacatggtgaaacctcatctctactaaaaatacaaaaattagtcaggcatggtggcacacgcctgtggtcccagctggagaaggaggatccttattattctgcacactcaccacatttgcttgccaaatgcaagcacaacctgaggattcctccagcactttcaatgttactactgcttcaacattccaatagttgacagtagatataattttggcaaaattagaagatcttatggaatggtttgtctcattcaatttctgacagatatgttaaagaattgttttcctgtcctttcgtctcctcccttttgcagttttgataacacagttaagcagaaaatcagtgagctagtctcccagtgaaatctcctctcttccaagggactgtgcccaagtgatcctttgatcatttggagaaataaagccctcgctgtacagaaaagctcagctccacagtgcctcagccacagagcagatcagcagccatgctgtcatatttacagccaggtgaaactctgggttctttgctctgcatatttgtaaaatcaccaactatgatgagagtccacgggatagcaatttgctgctgccgaaacatttccatgcaagattccagggaaaaagaaaatggcatattcctgggtcttggctgaaatgattttgctgttatttgataaataatagtgactgtgggcttcttttatgttaggtattctgttcacacacagataattgggattgcaacagatattttgtttttctttaaagggagttgatcttaataacaaaaaaattaaatatattcacaggcatatgactagacaagtagtgtatatatgacacaataactaaactaaaattgaacagtataaatttggcacagtgtacattaaaaaatctgaataattaacctcatggtgctttcattcacatattgggaattatatgagtctagaatgtgagaacgtgtgctgttctcattttctagaaaagactagaattttcctttatatggaaagaaatattttctttcagattggaaaaatatattcactttgtagggtaacattgacacagcaaggtttttgtgtgtggtttctagatgtgggaaatgtgaacttggcccaccataccgtctatatctattgtatgcattatcaagaattattatgaagggatctgttgtaattagttgacacaggattactattgtctctgcattaatgaggtagaggtaaaacaggatctctgtcttgtaggtcctcttttccctctgctccctctccttcctgctgttaattttcaaaagcccttcaggattttttaaaaaggaaagcctattgatgtgacttgataatttctccttaaaacaattcattttcatttctttcagttgagaattcaatttttgactcagcatttagccctaaaagcatttgaaacagggttgatcatgtgccagatgtgcataaatgctttacatccattgtctcatttgatcctcacaacaccacaaagttggtgttgttactcccattgtgtggcaagagaaggtgaggcacagagaggtaaatggcatgcaccaaagaactgacagctgttaagtgttggaattgtgacttataatcctttgggtatatacccagtaatgggatggctgggtcaaatggtatttctagttctagatccctgaggaatcaccacactgacttccacaatggttgaactagtttacagtcccaccaacagcgtaaaagtgttcctatttctccacatcctctccagcacctgttgtttcctggcttttcaatgatcgccattctaactggtgtgagatggtatctcattgtggttttgatttgcatttctctgatggccagtgatgatgaacattttttcatgtgcacatgcacacgtatgcttattgtggcactattcacaatagcaaagacttggaaccaagccaaatgtccaacaatgatagactggattaagaaaatgtggcacatatacaccatggaatactatgcagccataaaaaatgatgagttcatgtcctttgtagggacatggatgaagctggaaaccatcattctcagcaaactatcgcaaggacaaaaaaccaaataccgcatgttttcactcataggtgggaattgaacaatgagaacacatggacacaggaaggggaacatcacacactgtggcctgttgtggggtggggggaggggggagagatagcattaggagatatacctaatgttaaatgacgagttaatgggtgcagcacaccaacatggcacatgtatacatatgtaattaacctgcacattgtgcacctgtaccctaaaacttaaagtataataaaaaaaaaaaaaaaaacctgtgacttaaactaggctaaatgcccatcattggtaaactggacaaagaaaacatgatacatatacaccatggaatactacacaatcataaaaaagaatgagatcatattcttggccgcaacatggatggagctggaagccaaaatcctgagtgaactaacgcaggaacagaaaaccaaatactgtatatcctcactttgaaaggtgagaggtaaacattgagtgcacatagacacaaagactagaacaacggacactggggtctacttaagggtggaaggtaggaggagggagatagtaaaaaaaaactaccgttgagcactatgcttattacctgggtgacaaaataatctataccaagcccctatcacacaaaatttacctatataacaaaactgcaaatgtacccatgaacctaaaacaaaagtttttttaaaaaaatcctaggcttctgttgaagcctatgggctaattttttcatgatactgcctgtgcttgttaaatgaatacatgtaaagcacaaggtctagcacaagtaataaaatctagttataagcaaactgttatttttattttctactgatgtttagattcagtattgttttctttccctgtgttggagatttattttagagtaacctagtctcatttctgtttacatttcagagacatttgtaggttttattgttgatgttgatttttttggaacaatatattgaaaaaccaaaatgtcatgaagttactgaaaatagttattccacatttcaatctccaatcttgttcctaatctcaaaattttgaacgtctacctgatttaaatttctttgagaagttttttgggtaggatgaaggagcatgctctggagttactgggtgttttctttcttcctatggagccaccctgttttattcatactcttgccaagcttccagcacggaagctttctctgtgatagattttctctggtatgaaatatttttttttctctttctcaaaatcactattaatgaacgtactggaaaatggagcagcctgacaattttggttctgaatgtaaccactatgaaaattttctaaaatatctaaaatatccttgaagtttctgtttcctcacttaaaacccgaaaaggttggactagatgaggaataaaaaatattctagtagactgaactatatgaaattaccatttttgtaggtaaaaaaagttgattattggtcatttcatatgacctaacctaagagattaactatcttgtaatttcaggttaaatattaatatgtatttatatagagaaaaagtagcagtgtgcagtcttctctatgaataacttctcctcagaagagactgagataccagcaaaatgttatgaattcttttggaataagtaggggttattttggaagatgctcagaatcttgaaattgtgatttaataaaagatctgttttttaaatgtttatagcacaatgtagtatgtgagcattactgggtaattgaaaacagtatatgtgagtattaaatatagctacaaaacagtattatttgccatcaactttccattttttaaatatattttcatgatcctaatggttttgcaagtactagtaaactggagctaggtttaagatattatccaacattttctctctaactaaatttgatatgtcatgtaactcttttctgattttaacagaaattctgactatataaggtcaacacacacacgcacacaatatattgcatggctgagttttagtctttaatccataaatatttcttttgctgagaactacagaagataaaaatgctgaatcagacgtaggccttgtccccaaggaccttgcagtcaatttttaggtactgttcaatctaaacctgtcccattctgacttctggacttgtgtccttttgctagcaaactgacttcatattcctttttgataagtgctggagctggctgggactggctcatatgagcccattgttaaatacgcaggaattttgcaaggcagttgctaaactgttattagtttgcaattggcctaggtggaagtatttaccccacagaaattggcagatgctattaatgggggatttttttttttttttttttttgcctgagaggcactttgccagtataccaccagaattcaccaggctggcagttgcaatagaattctccaaaagatatacatccgattattacacaaagatagaattataaaatcttatacacagctacgctggggtaggataaagtgagagatcttggagaattgtggcttaagaaaaataacttcaaaactaagacaagcacccttagtttagatagtaagttcaatttctccttatagcctttgcaggaatactgataacttcccagggagaaacaaatggctttttttcactacctacaacgtacttcacattgataaatatcatatgtaattcacatgaggatcctgtgaggttattatttactgatagatttttcttttgttgtttttgctttctttattttttattcccactttaaaagcaaggctaaaagcacaggtgtgttccgtggttagtaaatagctgagttgggatttaaacacaggccatgctgactgcaagactgtcctgcttctaccacactgttttccaggcaagagcatctgataagtagggccagtgattttgagtgtcatctccttttttatcccttaacatcttccttccccaagattagctaactcatacagaagaggcaagaaggcttcttggagagtttctgaagtcaagatttagaaaattaatgatttgtataattcatacccaaagaaccaatcacaactttgccttaatgtcctcatttgcaaaataactattgtaaggaaatggaattgaaaatatttaatatctggagtttattatactgaagcattataggagcatagaaccttaggattttgtcatttctgtaggctaatgtctctccatacccttcctattatctctcacttttaaggacaatttttaaaaagattcatgttttttcaagtggggaatgagctaaaataaggaatctgtttttatctctcagttataagataggcagatgacagtactcagcctcatgttattgaatatgtgcagggagtgaaaaagacttctaattaaatgaatgccattgggtaccaaattttaaaggcctgcactaaatggccctagtcattaatcctagaaaaaagaaaatcgatgtgtgcagaatgttctctggtgaattttggtcatttgcttttcccaggaatattcactgactgtatcacatagtctttatatagctcaataatgagcaaaagaataaaaggagacataaaagaaggaatcagtaagtcagcactgacctaattattacaaagtgaatgtttttacaagtaacctgcaggcaactcaggagtgagaaaatatttttgttcaagcgtttcagtatttcttatgcatcataaagcttaaagcaaaaagaatagcattcagccataattgatgaataagctgaaccctgaattttagaataaaaatgtttacctgtaagttggctttaacatgataaaatagggatagtcaagacaaaggttgccttctgtttggctataaacaagtgtattctgttctattccaggaaagaaagaaggactcattttcttcattttttcttccttcccctatttctctctctctttcttagaattttcaggctcagagtctttaattataacattaatataggaaggacacgtttactgatttgatgtatattattttaaatgtgttttcataatatttcaatgtaatttggaaagcaaagataatagataatacatagaaataaaaacctgaactagaatatcaaaagatagcctttattttatgcttattccattgctcactgaggctttcttcagaacacaacaaaggtatccaggtctgtctaacttctacgattctataaaaaggaaaattaaaacataggccaggattacaattgtatataatcaatgcatgtaagaacatgtatatatttcaaatctgcaattttccaaaaacaaagaacatgtgtcatgattatcacttgtttgtcatttactcaaattttctcatgaactctggtatgactttgtcaatgctaattataaacttaccttgcttcataaaagacagcagcaaagttcatgagtttaagttctagggagctaaaaaacaaataaacagatcaatggaaactttgaactgtgataagcactatgatgaaaagtacataggctatgaatacgttccatgtattatcattttattttcttgtgcttgagcaaataagcatataaattattatttttcaagacctttcataaattttatgctgagattaaccattcatttgcacgtggcattttactaacccctacctgcatctcctcaaaccctccgaaagaataccctgtacaggcttagacccatgttttgccctgtagttctgttatgtaagatcactaaaaggattgagattgaaacctccaggaatttccccatgggctgtatttgttcttttaaataacttgaggatagatatggctttgctgtgtccccatccaaatctcatcttgaattgtaactcccacaatcccacatgttgtgggaggaacctggtgggaggtgaatgaatcatgggggtggtctttcccgtgctgtttttgtgatagtgagtacgtctcatgagatcttatggttttaaaaatgggggtttccctgcacaagttctcttctcttgtctgccaccatgtgagacgtgcctttcaccttctgccatgactgtgaggtctcccagccacatgaaactgtaagtccaataaacctctttcttttgtaaattgcccagtctcaagtaggtctttatcagcagcatgaaaatggactaatacagtaaattggtagtgggagtagggcactgctgaaaagatacccaaaaatgtggaagcaactttggaactgggtaacaggcagagattggaacagcttggaaagctcagaagaagacaggaaaatgcgggaaaatttggaactccctagaaacttgttaagtggctttgaccaaaatgccgataatgacatggacaatgaaatcaggctgaggtggtctcagatggagattaggaacttcttgggaactggatcaaaggtgactcttgttatgttttagcaaagagactggcagcattttgccccttccctagagatttgtagaactttgaacttgagagagatgatttagggtatctggtggaagaaatttctaagcagcaaagcattcgagaggtaacttggctgctctcaaaggcattaaattttacatgggaaacagaagataaaagtctggaaaatttgcagcctgacaatttgatggaaaaaaaaatccgattttctgaggagaaattcaagccagctgcagaaatttgcagaagtaacaaggagctgaatgttaatccccaaagcaattgggaaaatgtctccaacgcatgccagatacctttgtggcagaccctcccattataggcccatgggtttaggaggaaaaagtggttttgtgggctgggctcagggtccctctattgtgtgcagtctagggacttggtgccctgcatcccagccactccagccgtgactaaaagaggccaaggtacagctctagctgttgctccagagggcagaagccccaaaccttggaagcttctacgtttttaagcctgcaggtacacagaagtcaagaattaaggtttgggaacctttacctagatttcagaaaatgtatggaaatgcctggatgccctggcagaagtttgctgcaggggcacgaccctcgtggagaacctctgctagggcagtgcagaaaggaaatgtggggtctgagtctccacacagagtccctgctggggcactgcctagtggagctatgagaagagcaccaccatcctccagaccccagaatggtataaccactgacagcttacaccatgcacctggagaagccacaaacgctcaatgctgccactgaaagcagccagggaggagaccgtacccttcaaagccacaggggtggagctgccaaataccatgggagcccacctcttgcatcagcatgacctgtatgtgagacatggagtcaaaggagatcattttggagctttaagatttgactgcacctctggatttcgaacttgcatggggcctgtagcccctttgttttggccaattgctcccatttggaatggctgcatttacctaatgcctgtatccctcttgtatctaggaagtaactaacttgcttttgattttacaggcttacaggtggaagggacttgccttgtctcagatgagactttggactgtggacttttgagttaatgctgacatgagttaagactttggagggctgttgggaaggcatacttggttttgaaatgtgagaacatgagatttttgaggggccgggggtgaaatggtgtggtttggctatgtcaccacccaaatctcatcttgaattttaactcccacaattcccacatgttatgggaggaacctggtgggaggtgactgaatcatgggggcaggtctttcctgtgctgtactcatgatagtgagtgggtctcaagtgacctgacggttttaaaaatgggagtttacctgcacaagctctcttctcttgttgaccatcatgagatatgtgcctttcaccttccaccatgattgtgaggccttctagtgacttggaactgtaagtccaataaacctctttcttttgtaaattgcccagtctcaagtatatctttaccagcagcatgaaaacagactaatacacaattgcattagcctctaattgtgcctggctttctagatgtcctcagaggcagcacttgatgcaatggagtaggactcattgctctgtatatactgccttcttcgccttcttctggaggtccagtgcatcgccattgctgtcttcaaatatttgtgagtaccacgcttacagggcatcatagccatgatgaaggaaaacaacagacaggatttaggttccctctggaaagtacttcccatttatggcaagactcacaaatgtaggggtgtttccaactctacaaaaatatttagaatttccttaaataaagtgtctatctggagtctttggcatatatataacaagactggcaatgtactgagaatttgaaattaagtgataggcatattgggactcattatactattcttttttttttggtggtgaaattttccagttttaacatcttcacatgtggtatttaatttacacaccataccattttcccatttaaagttacacaaccatcaccacattaattttctaacattttgtcacccctaaaagaaattctctagcattcacctctcatcttccaatccctccctcaacccatcagaggcaatctctcatctactttctgtctttgtatatttgcctattatgtacattttacataaatggaattatacactatgtggtctttcatgagtggctttcagatgagataatttttcaaggttcatccatattgtagaatgtatcagtacttcattccttttgatggctaaattaatattccattgtatggatatactacattttgtttacccattcatcagatagtgggcatttggactgttttcactttttctggctattgtgtgaataatgctgctatgaacatttgtaaataagtttatatgtagatatatgttttcagttaccttaggtatatactttgggaaggaactgctgggtcatacttaattctatttttaaccttttgaggaactgctaaactatttttcaaagaggcaacatcaatttacattcccacaagccacttttacgttcccaccagccagttgtgtgaagattccatttttttcacatccttgccaatattgttattatgtgtttttaatcacaatcatcatagtggttgtacagtggtatttcttactatcctaatttggtatctgcttaaaacttttctaacaaagaacttttaaaaattataaatattaaattctctgagtttgtttaaacagtcatttgcagaaacattttattgataacaaaagagactattaaaaaagtagccactgcctcaatccatattttgaggtcactgattcttaaaacgttatattggtataggatagaactggagaggattttttttaagtttagaagatttattggttctttgagcatgtacgcaatcctaatatgctgtaagccctctcttgcaataccgtcatgtaaacacgcatcatctgcatacaggatgttttgtcactattgcctgattttaaggtatattagttaaaaattgactttctcttttagaaaaactgtgtttggagcaattatttagattcttattgtgcataaaaaagtaattcaaggtctctttttgacaatgactattgactagtctgacatattcttgattaaaggatcaacaaaccttttcatttctagaacatgaatatttattaaagcagattagaaattttatctattgttacctaggaactttttcctaataactattgttctgatggacaatggcatattctgaactacttcctggtctcccaggaaaatggcaagttagttacattagaatgatcactgggcggtttctttccatgttgcataattgagggaaaatctgttaacattgcttgaaataaaaatcttttaaaatattttattaattggctttaatctcaattttaatagagtaattattttggaatagttttattcttttccttgtaatctaatggcgtttgtgcagatataattttaagtagtcagccctaatgcaatcagtaattaaaattatagccaactacaggtgctgctaattgttaatcaattagatgcagagcgattacatatctaattgaaatactgattgaagtgttgatagttacccatacttttttcaaaagtaaactacttctaactgttcttaagttggaataagttgggaatattttctcaactactctctcactcattaacttatctgaactttagtggagaatagacttgctctttctgcatgtataaataaaattggtacagtagatcagaattgacctgactggctgttgaatgagtctgtgatttttaattggtttatgtgcatattaacaggccacattctgcagatggttgtgtgggttctgagtatctggatttggcaaatactaggaccattatataggaatgttacagtcattaaacactgatagaatccttgatttgccaggaggctgcagtgggtatcactgtcaacctgctgatcagcctttacagacattaattagttcacatatttataacaatttagtggtaagaatatctgcatgacaaaaaaaagatttgatatttattccttttgaaaaataattgttgaaattcgcaatataggctcaagtttagaaaggaacattttacctataccatcgtaactgaaaactattttgcagtttctaagcatggaatcacacgaataggagacagcaatagtaagcaaagactgggtaatattatttgtgtttcatgattgatcaaatcataatcattctaatttagaggcataaattctctacgaagccagaatttattttctcaaaaggggactatagtatggtgtgtctatttatcttagtagatttaagtaaacctgatttaccaagagcattatataatctttcactggaaagaatcaatcatgttcttcaaggaaagagtttgagttgaatatgcctgtttcagcaccatgcctggagtgtagcaagcatttgggatgtttattgaacaaattaataaagtgactaatgtaaattatagtgagattttctgcagacattaataaaaaaagatcattaacaatccaaaaagagtgtttttttattttttaaaaccagccatgtaattttgagactactgagatctcttgattgtgcatctgacgtgatgcttcagatgtaacatctcttctgtcagctgccaaaagtcacctattaagccaagtaaaaacttccaagtatagactgggataaaggaaagaaatttaggagaaaactacttcaaaaattttcctaaaaattttctctttttcagaaaatgggaatggattttagatttgtgtgcttgaggagagggaatgaaaatctgagcaaataccattttgattcaaagcaatagaaatgaaaaacacaaggacaggtgttttatcattctgtttggttgcatggtatgctatttgtgaaagcattgtatatgacactatttttaatccagcaattctattgtcacctgaacatttatggtttggatgtaaagtgtaactagtaaatcatactattggtctatcatctggcattacctgaagatcgaagagagagaacaattccatttacctcatccctggtaggaatatttgttaggatgcctgaagtcttcatttccaacaggagaaagccacaaaacacttgtggttctgaaagcagcctgctgttaacatgagttatgtgaatctgatctataatcttacctgacatttggaactcaaatattttccttatttctccaaaacaattaaaatatttagtctcacttcattttatgagacataaatagctatataagtactctgtaattactgtacattgtaacaaatgacctcataaatacattgtaatgtcccatgtaattacatggtacatcgtgtctttgagatggctgctctgagattgaaagcctgctggtttcagagattaattacttagggcctaatttgacagtttgcttgaagataggccgctgttaatagccacttctgtggtttcataaaaaaaaaactgtttcttcacaagatcttatttccttatttactatagacccagctgtacatgtttatccctgaatattggccatacctaaatttttctgtatataaaagcaaaaaagtgaaaagggcatggttctgtacaggaagaagttgatttgcaattatatttctcccatcaaacactatgacttattttatgacaataattttaaaagttctggtttattaatttaaaaaaatgttggggccaggcacaatggctcacacctgtaatcccagcactttgggaggccgaggctagcggatcacgaggtcaggagttcaagaatagcctggccaacacggtgaaacccctgtctctactaaaaatacaaaaattagccaggtgtggtggcaggctcctgtaatcccagccactcagaaggttgaggcaggagaattgcttgaacccaggaggcggacgttgcagtgagctgagatggtgccactgcattccaggctgggtgacagagcaagactgcatttcgaaaaaaaaaagaaaaaagatattggagtataagatattgtaaaaattatgtcatttttttctctgattaagcgttatacagcctataaactaatatttcattttgtaagagcccaaattcgtttgtcacaattattttatcatgagggcattattataataccttgcgatctcagtggttattcttgataaatgcatcttatcctatagttgccgtttttatatggcatgaatcgtatttaaaccttctttctctttgactcaggttgcttaaatatctggtgaaataaacttttctcaagttgtactactcaccttactgctcaaattctatctagtttccatgttccaaaacacaaaggaaataagaaataagtgaacactgtattttctgccttaaattatatactggccctattttcttgtgcctttctagggtgtaattttacatataactcccctgatgtatttctattccagctttcttaggtctagttcctacatcaaatatattatattgcttttagtagttttatttagtacaaacgaatagtctgagaaaggacctagtgatctgaaagagttaataagcccttctaaacatccagcttacttccaaggaatgatttaggcactggagaattaagtctattgatactgacaaattccaaaatgtattaatcgtaaactcactttatcataaactctagggaacaaccaaattgctttattgtaatggaattttgtcaaaacgtgaatacctcctagaaattacatttccagtttctaggacctagaagaaacaagcctggctactaggctatgcatagaaaattatcagatgtaaaaaatgctattttaaatccaggagcttaaaaaaagaagatgctaggtacacaccaaactcactgctttcttttcatgtctttttattctttgagctccaccccccccccttttttcctgtaagctgggctatactctgacatttggggatcattttcttagtcagtttaggaatattgggttggttttgcttagttagccaagaaagcccagcgggcaggaaggattaattgatttttctttatttttcttcccataatagaaaccatatatggttacatatctgagaagcaactcgaatagagctgtggtaatcagtggaaaaagtgatgtttctatgggtcattcatctgaatatgggaaaatttactatttaaaaaaaaccacctcagccaggcatggtggcttacacctgtaatcccagcactttgggaggccaaggcgggcagatcacctgaggtcagaagttcaagaccagcctgcccaaaatggcaaaaccctgtctctactaaacatacaaaaaattatccaggcatgggtggtgggcatctgtaatcccagctactaaagaggctgaggcaggagaatcacttgaacccgggaggtggagcttgcagtgagccgagatcgtgccactgcactccagcctgggtgacaagagcgaaactccgtctcaaaacaaaaacaaaaacaaaacaaaacaaaaaaacaaatctttgcacaatgctgaattgtctttgagaagcaaaagaacatttctcagagatttgtaatctaattgttgcaatcagattaagtatttatgaaggtaattcagtcacaaccagaatcactccatttatttatttttatgtctgtgaaacccaatcatgtgaggccaaagtgacttgattacttaattctttgaaaacttgcttcagtttttaatgtcattttgtgtttcaaaacagttatccatactactcctactgcaaatcatgacaatcgtgacatgggaaaactaaaataagagcaaaactttgtattttgtagtgttttcaattttctaagccctttctcatcgatcacctctcaataactagggagagataatgttgtaatacatacaattgatgctgctatataaataatttctactgtcacttagcaaattaatgaaaagctgagagtagaacaatatgcatccatgttcatatagtccgtgaataccttttatgtgcagaacactattctgcctttctctaaatgattcagaaatgcacactacacttgatcttagccaaaaagtcaagaagcaataggaatgcagctagatagaacatctaataagattttctaagcaccacacctggtataaaaattaagaagacctccaacatgtttctgtacatctgtgcctaggatctgagattcatttaacatttggagttaaatttttaaatagattactagcgttttttaaatttttattttagtttcaggggtacatgtacaggtttgttatataggtaaacttgtgtcataggggcttgttgtacagattattttgtcacccaggtactaagcctagtactcaatagttaatttttctgttcctctccctcctcgcaccctataccttcaagtaggccctggtgtcttttgcctccctttttgtgtccaaggatcactagtgtttatggtccagaattagcatgccagtttggggctacagttgaattaacctcatcactagagagatgtctgcaggctactctcagctgttgtccacttttctcctgatagagctccgagcttcatatttaaataactcaagaagtagttttttatatattactttggaagtgtgcaaaatactagcctaccagactctcaaattattagtctccactgggcttcctgtgtctctgtgaacggtcatagattggggacctcacaatgaaggtttggaaacctatttgaccctaatttactggttcaagtctcctgtgctcctacaatgaagcgggttgggtaagttattagtttctccttttttttccttagaattgtgaagtttgagttgtaagaattagattaaagcagagaaaagtggtggcatgtcaatttcccaaaatcaatttaaatttagctcagtttggctaaaaaatataaaaatggaacatataagaagtggagcataattcggataacatttcttactggtgtaaatgattttttaaaaaataaccctaactgtgttgattgtatacacttgaaaaagatcttggggatgaacaggcatggagttcagagccagtggcaggagggctgtgccctaaaccagaagaagtgaggtgatgaaggctgtcattcaaaaagacagtatccagagaagtggagtggtagaaagcagttatgcccgataggggagtcaaaaagactgaagagacatttctggttgtgaatcagaaggctagtaggttttgctggttcagagcgctaaagcaggtaacatgcctaagttcagaaagggtgggtgtattttggaagggaagtctgccagcctctgattagagtctcagagaagacagtcatcgctggaggactcagccttgcatgtcttggagggacctggcagattaacaaaatgaagggggactcacccggaaacaaggcagtgtccccaccagagaaatactgttacaagagctgggacccaaatcaaagtagatgatttgatttgaagttgaacaatctgagaaattgtcccaggttggcttacgtttttacataaccagggaaaggattctcccagagtaggtaaaggagagcttaatctctaggtaagagttccactggcacttttacgagaaccaggggccagcagggcaaagataaagattagattgttttacaactatataaatgtattgatgaagaaatgtttgtatcattttcaagctgttaaataaaatcacaacagcttagcctttattttttttaacaaagtaacatttcttgcttcaatttaagacatctccataaaattttatttaaaatcaaatattacccaacgtgtacttaaacatactttattactgcacaaatatttacttcaaactttgcatagtaatgtcagagttttccctctggaaatgtatcatactgatacattttgtctaacagttgtctacatgaaattacggatctcaactttagtattctacccaaatttctaacttcccttaatacaagaaattatatatttattaatgctaaacttaaaaatatgtcaaatcaacaaaaatagcatataagagtaggaaaaaatatgggcctttattatatcatattgatattttatcaaatccatgctgggttggtaaaataagtttatagatttacatagtttataaaaagacaaaattgttaatgaaaattgtttacaaatacacataatagaattttttcatagatatttatgttctagcttgaaattcagttagatgttttcaggatctatagaaatatttaccaagtatttagatagatactgtaagttaaacattaaatgttgctattttgtaattttgagattatgagtataacatttgttctgaatgatgaaatttgaaaactgccctttccaacattaaacagaatgaatccatatgggtaatctttgtttctatatcctctgagtgtttccatttgttgaatatctggtaggtaagtccagtgttttgttttttcttttggaaagtggattatttttcagaaaaccttatccatgtaaatgcattattatctaccgtgttgcctatgtcagaaacctgtcattcttgatgacttgtcctcctttgcatttgacattcaataattcaccaaatcctgtcaagtctacctccaaaaatatatatgggattttttattttgctgtatcccaaggtttcttcactacccatgcccggaggttctatttggtacagtaagaaatgtgaatggtaccctgcacagaggaagtttctcaataagtattcatagaatagaagttacaaaagtgttgctagacaatttctctctctcagtgctcctttcagttcacagtagaaacaaatgttcaattgttgggtcagtgcacaaataagtaggtccatattcttggcattggtactgtacgtggtcttgcttccttccttcctgctgttttccacttctgcttttctttattctttctacctggcaccctcacaatctttcagtctctcaatctctggatcgctggacctcactgtcactctctctttttctctttcccttttcctcccagtttcccttaaagtagttctgatttactacataaatattatgcgccagcactctgatggaactttcacacgttctcattgtttcctttcatttgtaccataatcctacgagggagggactgctattagctcatactgctgatgagaaaactcagtctctgaaggcttatgttgcaaattcagggtcacacactgaccagaaaggtaactgagatgggtgtgagcagtgtgagagtagaggctggggcgccagttagctatggcagtattctgggcaatagacaaatcaaggtcagaattagggtagtgtcagaggaaatatacataactgggcagaaaagggactcagtgaaaataaattctttcaaagtactgatgggcacactttaatgaaaaccctcagggcctcatgcatactgggagcatattttactctgaaagcaacttcctgtgagattcaagtcaccagaagtccaaaactgattttaaattagttttcaagattcgtagattcctgctatgttccagccaaggcattcttacttgctgcaaggactttcagagtgcccttcatagctttctatgggaattccatctagataaaaccatcttttttaaaaaaggctttttgctagagtaactgactgtgtttgacgaggatcaaaatgggtttgtcttcacctgaaggtcactctggagagagtaaggcagaatgtcagtgtgcagtaggagatgtggagttaaaaatatgataagtttatgaaatgtggcttctgagaaaaattggagtggtgggcttatcaacctcttttcctgtttcctcacttactactcttgtacgtctacagtggagaaaacagaaagcagtgttttaatggatcccaggaaaaggctaacaccacatcattgaattggacatgactatcccaggcagtttggagactggccagtgacaccctttgttttaaatcaattaactcttttccatcaggtttacttggcaaataaataatttttatggtgatcaaagaggggatggaggaattagaggaagctaaattttatagttcttattttttcccaaatatgaagaaaactgaaattattcattgattcggatagaacactgcaagtgataaggattaatttctccctctcaagtaataaaaggaccaaaagtcaagtcacagctactagaactgatttttcaaaagtcaaaggtcatgtgttaagtacttttaataaaaatcattgccagggttgcctatgaaagctaggttgttttacaaaaatgttcccgtaacagcgacagcttttggtggcttgctgagggaatgggaaatgaagtctgaactactgggcagtggcaaaataggtctcatatagaaaatcagatgccttataccattaataagaaaagaatgcctgaatgctttcatttaacttcctaaaacacaatataatttggagcctccagctgtatcacctactaaagaacctaagaagaaagaatctttgtaatctgctgacgcttgaagtcaatgagaaagcacaaaagatgctaataaacttagctgctacctacagatgaggatgaataaaactgataataatcacttccaaagatgaataataaccattcagggggtttcactcctggtgtgttgagtgtataactgattatattaattaattgctgcttggcatcgatattaaggtattggctatgtgggaataatttaagcgatcactggaaatcctcaaatgtgataaagaaaaattgtcaaaaactattacttatgtaatcattagtataattaagttctccaggcttatcaagtgatttacacttggtagacatactaagcacaattgttctctctttttcagtatgtacatggagattcagatcacttattagactcatagctggggatggtggctcactcctgtaatcctagaactttgggagggtgagcgggtggatcctttgagcctaggagttcaagaccaatctggacaacatgacaagaccctgtctctacaaaaaatacaaaaagtatttagccggactatgtggctcctgcctgtagtcccacaggaggtggaaggatcacttgaacctgagaggtgtaggctgcagtgagccctgattgcaccactgcactccagcctggatgacacagagagaccctgactcaaaaaaaaaaaaaaaaaaaaaaggcttgcagaaggtcactcagcaaagtcacagcaaaacaataattggaaattaaaaggttctaattcttgttctaaggtttaatatctacatttgtattttccttttcaacttgaatttatttttgactttaaaaacagctgtagtcttcagaaggtggccctccttgattttccaagggctttgtatgggaaagcttattggatgtattttaaaagaataatttaaattatttaaattctagtttttaaagagaataggagaaattagatgagtataattgccaagtagagtccctgtgattacttattttagtgtgaaataatgaaaggaacattagaccccacagttgggaagtcttccattgatagtgccaggtgaccttgggcctatccttcttttaactgtgtcccaatttccttctttgtaaaatcatcaatggtgataatatctgccatttcaccactcaccactaagatgagtagtgaaacataaaccatgactattcttttaattctggttttctttcctagtttctaaaacactggggagtaaagaatatgtccacacatgtgcacctacatgtatgaatggtggggaagaagggaatagatgggcttgtgtgtatttaagactatgagttctttgcagccagggactctacactattattttatgcattattttatctcccaaataacttagccaaatgccttaaatgaacacattaatccagccttctctctcttttgcatggtctgaaaaattttgtaatgtttttcccaatctacctttccttttccttatcctatatatcctttgctttagccactaagagactacatgagctttccctgaagatgcttgacgttgtccttacatcttgagcttgttcttgatatttcctgttttaaataccattcccaacccctccgtgaactccaaatcacacttgaaggatgagttccttgtaaagtccttttggtcatatgacatagaattaatcactcttggacattctactataaaccttagcatgttgttttttcattattagttcatatgtctctttcctcagccagaatgggtaaatcatgacttatttacatgtttaccacatcaagaatgtagttgatacatgttgaatgagtaacaactaaatgaattagactctcagcctcttgaacttctcataggaggcaatattaagcagaaaagaatgtcctccttttgactcatgttatctcagttaaaattctgcctattgttggatacatgtctattttatttaaccattcttgtcccagtttacctgattttacaaaggtcatagcaatagaccttaactcacagagtcataatgagcataaaaatataaataatgcagagtgcttagaccattgccaggtctaaagtaagtgcaaaaaatatgttaacaaatagtagttaagagtggtgcttaatttatcacacttaaagaatagtggaaacaaagtaaaggatctcagtgcgatagtattttgaatatattctaccaacttaatcagatcaattgtatgtaactagattcctctgaaattagtaaaagatttttattatataagtacagttgatcctcattatttacagattctgtagttgcaaagttgcctgcctgcttgctaaaatttatttgcaactcaaataaatacccttggtgctttgtggttatgcttagagcagggtaaaatttgagttgccaaatgtccacgttcccagctgaggttgaagaaagagatgctctgtcttcttgttttagccctcatactgtaaacaagcaccctttttgaggtccatttggtgccatgttttttgtatttctgtgcttttggttggtgatttttctgtttaaaatgatcccagagtggagtgctgaagcactgtccagtgttcctaagagcaagaaggctgcgatctgccttatttctcgcattaaagttcaaagttaaagagttgacaatactgtcatattaaataaggtatcattaaatagaaacacacataaaacaaggttgggtacccatcagttgacaaaaatattgtaaccagaggcttgaaggaacctaaacctatatttcccctaggagcaatatttcagtattctcaaattcagtgctggggtgagggcagctatacagaaaataacaaagtaagttactcagcaagtaaatgcaaatttagattatattttttttcttctctcagagaaacttatctgcagagcaccagctaatttgtggtagatctggaagaaggaggttggatttctatctccctggagagtctagctctgcctctgctccatgactgaagcagggacagggaggtcctggacaaatccattatttgacgttggttctggattctttctttctttctttctttctttctttctttctttctttctttctttctttctttctttctttcttttcttttcttttctttcttttcactctttcttttctttttctttttcttcatttcctttcctgtcctttcctctcctttccttctttctttctttctttctctctttctttttccgagatggagttttgctcttgttgcccaggctggagtgcaatggtgtgatctcggctcactgcaacctccaccttccgggttcaagcgattctcctgtctcagcctcccaagtaggtgggattacaggcatgcgctaccacgcctggctaattttgtatttttagtagagatggggtttctccatgctggtcaggctggtctcaaactcctgaccacaggtgatccacctgcctcggcctcccaaagtgctgggattacaggtgtgagccactgcacccggctgtgtctggattctttctaacagcctgtaatttgtttctaccacctcaaaacaaaaaacaaacaaaaaacctctgtgtgcttattttaaaacttaatttaaatattttcagagtattacatgcacattattttttaagttaaataatactaacaagcctataacaaaaacaaacaggctctttctttcccctccccaaaccctgcctccattccctaaagactgcctttttttttctgacatttacctttatgtttctcagtaatctacttatttagatgtctcttagtttaccagttttaattcatcatttgtagatatcatctattggtttatttttatgtcaggatttggtgctgacacacttccatcctcattttcttctccaatcttttctcttttttctactgctgcttctcctcctcttccttattttgttgaggtgtaattaaaataaatgaaattataaatcttaagtgttcagtctcatgaatatactggtattctagggctgccataataaatactgcagactgggtggcttaaaaaacaggcatttattttctcacagttagtgaagctagaagtccaagatcaatgtgttggcagatttggtttcttctgaggcctcgctcacttggcttatagatggctaccttcttcttgtgtcttcacgtggtttttctctgtgcatatctgtgtccttattttcttttagagacaccaatcatgtcatatttaagacctaccctcgtgaactaatttaaacttcattacctccttcaaggacttatctccaaattcagtcagattcttctaagatacaggagtaataacttcaacatatgactcttggtggtcaaaattcagcccataaatatgtattttgacaattgtatccatctgagtaacaaacatgacatcaatatgcagatttccatcaccccaaaaagtctactggtacccatttccaatcaaaacccagaacaactatttagactattctgacttcgaatactgtagattagttttgcctattctttaacttcacataaatggaattaaacagtatgtactctttcgagtctggtttttcatcatattatatcttttatcacattacaattttcttcattgtcttcaatgctgtttgttgtgttttaaatatttttttttcagactgcactcttttcctggaacacatctttcattagcttcctgttaaggaaaacacaaatagatatcttagaaaccatgtatatctgaaatatccctatactgtccttagcatatattcttatacttgtgctatattatccttatgcttgcttatttgactggacattaaattctagacttagaatcctagattagaattgtatgattcatgttctattgttttctaatatcgagtgttgttgagaaatctgatgccattcttactgttgatcatgttttatgtgacctgcttttttccccttcattctggaaacttgtggatcccctccccactctccatgaggctctagtattttacagcaatgtgccttgaaatggatctgttttgcatttattttgtttaatattccacaatctttttcagactagagtctcaagtattccagttttgtaaagttttattgggaaaggggtcattttatcatttttgctaattttctaccttttatttttcctgcttttttattctctcctcaggggtgttggaaattgagaaccaaatctctaatttgttaccttttctctcccatttcatgtgataatttattcccactgaattttgagagatttcttttaattcatcttccaacttatttattgaatatttaatttgtgcaatcaaattatatttgtaataagtttctaaaaatcttttaatattcttgtgtttttatcctgttgatggatggattatcatttcttagattaccagggtattaatgacgtctttttggatttcattctttgcattactgatgtttccttcatgtgctgttatcttcttatgtattactttttccacttcctttatgctaagggccttctttgatgtctggtaatcttaaattgtcagtttacattaaaatgaagtatgaaaaagctgattttaaactacaaattttagcacttgagttggacttattaagtagtgaaatgggagaattacttgaccccccttgcaggatatgtgacaccggtgtggcctgtctgtttggctgctgcaccctcaaaccccttatgggacagggagcatgcagacaggcaggagctagggtgagcacttttggtctctgagcccacagtagcatctaggggttgctgtctgtgactcccaaatccccagtgagtgtgctacagtgctctttcagctctgccatctgcagacagcttaagtgttaaccagctcagtgccttcttggtacctgggttcttgtccagcatccaggaagaatcaggtcacatgaacaaattgaaggatggtaaatgtgggggattttattgccagatggaggtggctctcagcaggatggatgggaagctagaaagggggtggagtgggaagatgatcttcccctggagtttggtggtcccatggctgatctcctacccgactatccccagctgaactcctctcgatgttcagatgctccttctcttttcttttctgccacactgctcttctgttcctctcctcttctgctagtctgctcatttgcttgtggagcctggggtttggggttaatatgggtacaggatagggggacatggcaggccaaaaggcaacatttgggtatgaaaacaggaatgactgttctcatttagggctgtgggtttccaggcttgagggtggggccttttgccagagaaccaccttcttttacccagtatttccctgtctcctgtccatatcagtaggagcctcattgttggggaattgatcagggatatgactgttttttttttctctagggcaaagataataattttctctagagaaggattatatgatattctacccaagaagcatatacctggttgccattgctctaggtatcatatgaaggaagaagacatgggtagctcatatctttgatttacttactcttgcctacatccctgttctctcctgtgtttaatatctctgaaactttggcctctgagttgaatatccccagaggataaagctaccaacacctccaaggtcagggagggttagtagcctgggtttactgggtataggtagaaacctgatctgaatgactttcagtccttcccctccttcaggactatgcttggaagtcctaccttccaagttatataagcaggaacaatgtctaggaatccctgacttttgttgtgcttttcattgccttgcttttttattattgtctcttaagaacgtatttagttttccggctctcttctttggctcagtcaacctatgatacggtttgactgtgtccccacctaaatctcatcttgaattgtagctcccataattcctacctgtcatgggagggacccgttgggaggtaattgaatcatgggggcaggtctttcctgtgctgttctcatgatagtaaataagtctcacgagatctgatagttttataaaggggagttcccctacacacgttcccttgcctgctgccatgtaagacatgtctttgcttctttgcactctgccatgattgtgaggtttctcagctatgtggaactatgagtccattaaacctctttttctttataaattacccagtctcaagtatgtctttaattagcagtgtgagaacagactaatccactatagctccctccgatttgcaccttccaaatattagttgacatctctcatgcaatatagccttattctctattgttttatggctttataccatttagaatattttactgtcattttagcagtgtatgcaaaggagaggtgataatgcattcaatcaatcaaaggaaatgtgtatttttgttaaaaccagacaaataagaatgctgtcagattataagaacgaatttaatttgtctctaagtggcaatcgctaacacttcttgcttctctgctttcttcacacttacgtttgggttacttctttgaccctgtcccattgtcctttctttcttcaatgttttaatttacatctattattttacagagtatcaaagttagctggctgcctcctccatcaggaacacaaaatggatttattaccggctataaaattcgacacagaaagacgacccgcaggggtgagatggaaacactggagccaaacaacctctggtacctattcacaggtcagtgttcacatggtgtagtcttgcaaggttttgatgaattaaatgctttaggaataaaatatagtctcactccaaaggaacattgattttcttcctggcatccaggcaggtgacatctattggctggaacaagaacaacctttatatttttaactttacattctctataatgttttcactatatatttctctctggatcatcgtcttaatacatgtatcataaaatttttattcatactagtttctcagcattgctgattcaacaaaagcatctgttatctaaaaacttaacattttaaccagtaacttttaaaagtcatctaatgaaattgttccaatttcaatcactttgattcccctctaccaatattcaggggtgagaatgggttgaaaactgaagaaaagggtagattgtaaaacaaagagagagattattctaccttctgccaatataaagtaaattcacttatgcagcaatattgatagaattcagagtagatcaaccttctctatgaaaactggacccagtttgcatgtaaagaatatatttttttaaattttataaaataatcatgtatttaataactacagcctttaattcacaacagctcaggttcctagaaaacagaatgaggcgaggctttcaacgtaatacctttaaagttataagttcaggaaaacaagaaggagagaacaaggaaagcaatccagggaagaagagaaaacagataatggtggtacattatccatctgtggtggccacaacttcggggcaaacacagcacttgctaggtctcctgggtgtctcttgagaagccacatgaactatctcacagtccatggatagaaggtgtgagcagttgctctcttgtttctcactggttgagttcaccaacagcttactgattactctgcacctcccaggcagtccccagtgaagccagagcttctgatgactctgcagacacataggtgtctttttgtcaatcagcattttatgtgatggtggcttggcctagggtatgatcagagctcagggcttttcaaacctaggaatatcttgagctactgccagaaacttggcaagcaaagcatatagaatggctcatgacacagctgggtagatgaagttgagcgactctgaagtggcacataaactgggtcaggacaacatacaaaccataaagcacatgacttacaatttatagatgaggtaaactaccattgcaagtgagaaaaaagaaagtaatcccttatgtagtccttttctctacgccagatactcagcgaatttccatttgaaatcatgactcacacacattataagcttcttgttcagcctacactcagagacttgaaagtaacttgtttatttattttttcttcttttctctcaggttgtcttttatgcctatataattttagcataatggccagagcacttccaaagtagattgccaaaaatcatgttttaaatatggacaaaatctctgaggcagggaatggttgaatctaacggaaagtttaacatttaccatatcattttaaaagattttgaaaagccaatatcctatgtttttctttttcccctgacaaaataatggggaagatggtaaaaataatcaaagtgaggaacatgtattcattaggatatttggtacaatatgacttttactttgagagaaatcaccaaaattgaaaaatcttgctaaaaatattttagtatggattctaagatttaatattagagtagaggagacactaaggataatttaatccaagctcttccagacatagagatttgaagcctcaaaactttatcatcattgcttttgcttctcaaatgataaacattgagaatataaaattaatttcttactataaaataattaactaaaggattaatattccaataaaaaagctaatgattggatgttcaattcacagaactatacgcagccaataaagatgataaaatgttcaatctcattagcaaatagagaaatgcaaattaaaataaaaatgagttagcattttcctttgattaaagtaataaagataaaaataaatgagggcatcccattctggaaagcatatgagaaatgtaaactctcatatactgcttgtgggacagaaaatgtccataacccttctggaaagcaatgtgtgtatatatatatatatatatatatatgtattttatacgaggtatatacatgtgtatgtggatgtatgtctgtacatataattttcttttcataaagatatgacccaggtttccaaattctatgagtttatcctaggaagcaatcatatttttgcaaagtttttagctagatgcatattgtcatattattttaatagctaatagtgtttttgaaaacctaaatatccaactataggaagttacctagaaaactcagacacagttgtatcttggaatactatatgtctaatttaaatgaaatagtgtaaaaatgttaaatcatatgtaaattatgattatttaaaacatagtaagcaaataccccagttttaagtcagtattagtacaagagctcgtatttattaaaaaaagcattcacataaaaatatttagaataatatatatcccaaattgttgaccgtgaatattgcttactttgtaacaacagtatgatatgtatttttaattgcatatgcaaaatgaaaaacaataaaaaaaacaatttttgctttcaaaaattgaagatttcttcccactaatgctaactcaatatcatctgaatggcttagaaagcagtggtccagaaaacaaatgaatagtagcctcatggccagtagaatttgctagcgttaattgcttagtccttatgagttattttggcaaatggaagttaacacattcagttagtattttcaaaccaagattctgactccctaaataacacatttaggactttccctctgtttaaggtaaaatcattgaaaaaacgcagtacggcaactattagctttctcaccagcagagacccaaaacaaaataccacgaatttcgtaacttgaaagaatagacatttattctcatagttcaggaggccagaagtctgacattaaggtgttggtaggttcagctccctctgtaggctctgagaaagaacccatcccacaagtctctcctaactgctggggttaccggcagtccctggtcttccttggcttgtagatgcattgctctaatctctgcctccatctttttatactttcctctctgtgttctctcctcttccttttttatttgttttgtttttttgagacagggttttgctctcttacccaggctggagtaccgtggcatgatcatagtttactgcagacttgaccttcgggactcaagtgatcctcctgcctcggcctacggagcagctgggactataggtgtgtttcaccacacccagctaattttttaaatttttcgtagagacaaggtcttgctttgttgcccaggctggtctcaaactcttggcctcaagtcattctccctccacagcctcccaaagtgctaggattataggcataagacactgtgcctggcctctctcctcttccaattaggacattagagatagagcccacttgaaatccaggatgacttcatcttgagatcatcaactaattataactgtaaagaccctatttccaaataaggtcacatgctgatccttcagacatgcatgaattctagggggataccattcaaactactatagactcctttttaaatttttcctctcaaggacaatcattttgaattgtatcttctaataaactttacttactcaaaaataaataattcagttctacattttcattcatctaaaatatgtgtgacagttagaacttctaatcagcatgaggtaacccatcaccactctggtttattatcattccagccaaaagcaaagtgagatgaattaattagttattaggaacagctcacaaatgcccatttgcatcttcatagagctgtaagaatttggatccaaaatatgtaggctttattcatattgttacatcttgatttcatgagttataataaagcatttaggaatgcaaacaaaatatgagcagttatatgtgcgactatgcctgagatttactgcaaacatatatgtgcgtgtatatatatatatatatacgtgtatatatacgtgtatatatatatatatatatatatatatatatactctttctaaatttgaactaaagcaataaaaagagttaatgaacagcatcatatacttaaaatttttttgagtagctttggaaaatcgttccctcctctcccctgctctgtgactgggctacagaaacacctgttgcattgctagatattatgggaatatatgtcttcaatgctacaaaacattaaggaaccagggagcgctacatacttgtagattggctttggtttagacatgtccccaggatatatatagcacttacacactttgttgtaagcagaagtaattgattttccatataaatctacagcactgtaaaatgtaaaggatttgatcctatgattttaatgcctataagatacatggatttattgatttggctgtttaaaaaattggaaatttcagaatgctccatttgtatgttataaatattcaggtgtagatactcaaatttttttttacaatcttctatttgttagacaggtgttttttgtgtgtatgtgtttttttaatgagaataatgagacatctgcaataacaaagtaattcagagttataacaagaattgaaatcactgctatcaggtttattgtgagaacccatgtcaactaaattttaaaacgtttttaatttttgactgctcttcagggaaggttgtttgaattgaatttaagagttttcttgtgtttcatggtcaatatataataaacataataataaagatgcattgatagtttatggactgaaaaattgaaataatagcatagcaattttataacagggctaacattgggaaattgtgttgtttgaataatatgccatctcttactagaagttctaaaaattagaaatagaacataagaattacaaagcttgaggacacttagcattcaggatagaaacctgcagagataatcaactttcaacaactgaattttttacagctatgaaaagcattgctagttacaccgtactacccttacaataaaggtatacttagaagcatctaggacacacacacacacacacacacacacacacacattgagattgaactttatgatcctgacaaacatagcaggaaacacagaattcgtctcatccaaactggttgggttttattttattttatttatttatttattttatttatttttttttttgagatggagtttcactcttattgcccagactggagtgcaatggtgcaatctcggctcactgcaacctctgcctcccgggttcaagtgattctcctgcctcagcctcaccagtagctgggattacaggcatgcaccaccacacctggctaattttttgtatttttagtagagacgaggtttcgccattttggccaggctggtctcgaactcctgacctcaggtgatccactctccttggcctcccaaagtgctgagattacaggcgtgagccaccgcacccggccatactgcttattttacagaagaaataactgaggtctggagggtggtatggctaaggtcctccactagttaaggagatgatcccaggtgaattgtgtgttgtctaactcctcattatgtgctcctttcactatgcgtgttgtcatctttagttcactttattgtgagtgattaaggctgttatataactttgtaaaagataattaacattaaaaacaatgtttaacatttacaacaataatacccatattattacttactgaactcaaatcattcactatgctaaaagctatatgtgtgttttccattttaatctttatgacagtttttatttatgtatccccattttatggatgagggcatggaagtaaacaaagaggcctggtttttcatggtcaaccagctaataagtaatggaatgaaaattcaaacctaatactgcctgaatagaaaacctatattcttacctcttaaactgtaaataatgtgtttctcaccgtaggcaatgcattcgtgattgtatcagtattaaaagggataggagaaaaacacaaggatggaaaaagatgtctattggacaataaaacttaaagattaccatacagtgggtagggcgcggtggctcatgcctgtaatcccagcactttgggaggccgaggcgggcggatcacgaggtcaagagatcgagaccatcctgtctaacacggtgaaaccctgtctctgctaaaaatacaaaagaaaaaaaaaaagaaaattagcctggtgtggtggcgggcttctgtagtcccggctactcaggaggctgaggcaggagaatggcatgaatccgggaggtggagcttgcagtgagccgagattgcgccactgcactccagcctgggcgacagagccagactctgtctcaaaaaaaaaaaaaaaaaagaaaaagataaagataaagattaccatacagctagaggagctgactaactctagaacatattaaataaaagctttcctggccaaattatttaaatttttaaaaatattcctattatcccagttcaggaactagatctaagataacagcttttcaaaatatacatacaaaaaaaaagcttttaattggccggacgtggtaacttaagcctgaatcccagcattttgggagaccgaggagggcagatcaggaggtcaggagatcgagaaaccccgtctttactaaaaatacaaaaaattagccgggcgtcgtggcaggcgcctgtaatcccagctactcgggaggctgaggcgggagaatggcttgaaccggggaggcagagcttgcagtgagccgagattgtgccactgcactccagcctgggcgacagaagcaagacactgtctcaaaaaaaaaaaaaaaaaaaaagcttttaattacagactgccttctctttactccacctccaatgaaagagagagaggaagggaaagggaggggagaggagggaagggaaagggaggggaggggagggatttgctcagcctcctcttcctgctttttatcgttcttttcaccccctctcactcacctccagtcccctcccgccccccttttttctctcttttctactcatctcccacctgctattttgcctccattgagaacaactacatgtttcctatctcgtttttattgttccatcttccctcttccctcaactctttgcctctctccactactccctcaatccttctccgctatttcttttcctcctcctcccctctcgtcccctcgtgctaccctctatcccttctttcccccctccttcccccctatccccctccttcctttcccttttcttccccatctctccccatcctcctccctctcttcccccctcttccccgccttctccctcctttcccttgccctccccttccctcctctctcccnnnnnnnnnnnnnnnnnnnngaaggaagggagggaaggaaagaaagcaacattgaaagatcttctgatatcagctatcagagttggggcccccaaaaattgcttggtggtggttattgttggtataactctggaagataactcttttctctaatagggtatatttatttatttattattgttattattattattttgaagacagagtctcgctctgtggcccagggttgagtgcagcggcacgatctcgtctcactgcaacctccgcgtctcgggtacaagtgattctcccacctcagcctcctgaatagctgggattacagacgtgcgtcaccacgtcaggctaatttttgtatttttagtagaaacggagtttcaccatgttggccaagctggtctggaactcccgacctcaagtgattcgcctgcctcggcctcccaaagtgctgggattacaggcttgagccaccgctcccggccgcatttctaagcaagagaacaaattaactcttcttgagactgaattttggatattactgatttcttagcttgatccactgtcaaaaataatagaatcatcaattttaacctccctacctgcctattattcaagtctgatgtagtgatcatagatagatatttcttccatgcctgcatagtgctttaaatttgttgctaatgtctctcttgggttctagcatagggcatgtgggcctttgaaggtgcccagcaagagacagaacagagtcaagattctttacccaaggatagtccaagctttaactaaaacaccataatacgttagcttaatttctctgagccttattcatgtctctaaaatgggaccaatcatgtattctgcgccaaaatcgcagggtatttgaaaaatcaagaaagtaacctggaaatcactgtgccaatgtcagttatcactacatctatgaaacgcttgattttataaatcacttttacaggcaatttttcatttgaccctcacaagaaacactataaagtggaagcatgtattattacttaatcacgttagataggaaatagctattaaaagagcctccagtacatctaaaattttcccaaacaaatcacagcatagaagcagggccacctgaaacctggaattctaaaggtaatgtccagactgcttctctgaaaagtcaaaatttctgcttctgctttatatcatgcacttacttgggtataaaaaaaggatcgcaagttaaattttcttgataaaggtttgataaaaaagttaccgaatttagaatccaaagtcttggataaacatgttttataggagaaacttaatttgtttttatcccactaggataaaactagtgcagtctatctgtaagtgatactatggtaaatcagattcagtgcaacctaaggaagaacttttctaaaaagcaaaacttgaaggtgagttatctccgttgctgaatttctcatccaacaaaagtattcctgctttatttacagggacactttgttagatattcagcattatatgagccatttgactagatattactgaagattttctttaataatgggattctatacatatctaaattttttttatacttaacctagcttttttaggtgtttgtagttagattccacagcccagcaaagttgaaggtgttttaaggataaaatataatacttcaaagacatttggcaggattttcagagtgacctgaggcactaatctctacaggatgctaaaacttccctgcagatgtaatagaaaggaagatatgaagagctcccctactgtatatggttggaagggatactctgataaatagtatagcctggccaggtgagatccctttggggaaatacttacaatacactagatggcctctaaactgctttctttttattattattataacttaagttctggaatacatgtgcaggaagtatagatttgttgcataggtatacacatgccgtggtggtttgctgcacccattaacccgtcatctacattaggtatttctcctaaagctatccctcccctagccccccactccctgacaggacctggtgtatgatgttcccctctctgtgtcaatgtgttctcattgttcaactcccacttatgagtgagaacatgtggtgtttggttttctcttcttgtgttagttcgctgaaaatgatggtttccagcttcatccatatccctgcaaaggacatgaacccatcctttttacggctgcatagtattccatggtgtatatatgccacattttctttatgcagtctatcattgatgggcatttgcattggttccaagtcttggctattgtgaatagtgctgcaataaacatacatgtgcatgtgtctttatagtagaatgatttataatcctttgggtatatacccagtaatgggatcgctgggtcaattggtatttctgattctagatccttgaggaatcgccacactgtcttccacaatggttgaactaatttacactcccaccaacagtgtaaaagcattcctatttctccacatcctctccagcatctgttgtttcctgacttattaatgatcaccattctaactgacatgagatggtatctcattgtggttttgattagcatttctctaatgaccagtgatgagctttttttttcatatattttttggccccaggaatgtcttcttttgtagtagtattgtctgttcatatccattgcccactttttgatgggattgtttgtttttttcttgtaaatttgtttaagttccttgtagattctggatattagccctttgtcagatggatagattaaaaaaatttttctcccattctgtaggttacctgttcactctgataatactttcttttgctgtgcagaagctctttagtttaattagctcccatttgtcaattttggcttttgttgccattgcttttggtgttttagtcatgaagtctttggccatgcctatgtcctaggttttcttctagggtttttatggttttaggtcttacatttaagtctttaatccatcttgagttaattttcatataaagtgtaaggaaggggtctagtttcagttttttgcatatggctagccagttttctcaacatcatttattaaatagggaatcctttccccattgcttgtttttctctagtttgtcaaagatcagatgattgtagatgtgtggtgttatttttgaggcctctgttctgttcctttgctctatatatctgttttggtaccagtaccatgctgttttgtttacggtagcttatagtatagattgaagtcaggtaggctgatgcctccagcttcgttgtttctgcttaggattatcttggctatgcaggctcttttttgaaaccatatgaaatttaaagaagtttttttttttctaattctgtgaagaaagtcgatggtagcttaacaggaatagcattgaatctataaattacttttggcagtatggttattttcatgatattgattcttcctatccatgagcatggaatgtttttccatttgtttgtgtcctttcttatttccttgagcaatggtttgtagttctccttgaagacacccttcacatcccttgtaagttgtattcctaggtattttattctctttgtagcaattgtgaatgggagttcacttatggttaggctattatcggtgtataggaatgcttgtgatttttgcacattgattttgtatcctgagactttgctgacattgcttaacagcttaaggaaatttggggctgagatgatggggttttctaaatatacaattaggtcatctgcaaacagagaccatttgacttcctttcttcctatctgaataccctttatttctttctcttgcctgattgccctggccagaatttccaatactattttgaatagggatggtgagagagggcatccttgtcttgtgccggctttcaaagggaatgcttccagcttttgcccatgcagtatattggctgtgtgtctgtcataagtagctcatattattttgagatacgttccatcaatacctagtttattgaaagtttttagcatgaagaggtgttggattttatcaaaggccttttctgcatctatggaggtaatcatgtaggttttgtctttgtgacaaaatatctcaaaatattgagataatcatatggttctgtttatgtgatggattatgtttattgatttgcatatgttgtaccagccttgcatctcagggatgaagccaacttgattatggtgaataagctttttgatatactgctggattcggtttgccagtattttattgaggattttcacattgatgttcatcagggatatcggcttgaaatttactttttttgttgtgtctctgtcaggtgttggtatcaggatgatgctggcctcataaaatgagttagagaggagtccctctttttctgttgtttggatggtttcagaaggaatggtgccagctcatcgttttacctgtggtagaattcggctataaatccatctggtcccaggctttttttggttggtaggctatttctgcatcaattccagaacttgctattgttctactcagggattcgacttcttcctggtttagtcttgcagcgggcggggggcatatgtgtccaggaatttatccatttcttctagattttctagtttatttgcatagaggtgtttatagtattctctgatggtagtttgtatttctgtgggatcagtggtgatctcccctgtatcatcttttattgtgtctatttgattattctctcttttcttctttatttgtctggctagtggtctattttgttaatcttttcaaacaatcacctcctggattcattgatttttttgaagggttttttgtgtctctatctccttcatttctgctctgatcttagttatttcttgtcttctgctagcttttgaatttgtttactcttgcttctctagttcttttcattgtgatattagggtgtcgatttgagatctttcctgctttctcctgtgggtatttagtgctataaatttccctccaaacactgctttagctgggtcccagagattgtagtatgttgtgtctttgttctcattggtttcaaagaacttatcaatatctgccttaatttctttatttacccagtaggcattcaggaccaggttgttcagtttccatgtagttgtgtggttttgagtgagtttcttaatcctcagttctaatttggttgcactgtggtctaagagactatttgttatgattttcattcttttgcctttcctgaggagtttttttacctccaattatgtggtcaattttagaataagtgcgatgtggtgctaagaagaatgtatattctgttgatttggggtggagagttctgtagatgtctgttaggtcctcttggtccagagccgagttcaagtcctgaatagccttcttaattttctgtctcattgatctgtctaatattgacagtgggtgttaaagtctctcactattattgagtgggagtcgaagtctctttgtaggtccctaagaacttgctttatgaatctgggtgctcctgtattgggtgcatatacatttaggatagttagctcttcttgtttcattgatcactttaccattatataatgcccttcttcgttgggtttttttttttttttttttgtgatctttgagaaaagcaaccccaagatacataatggtcagattcaccaaggttaaaatgaaagaaaagatgttaagggcagccagagaggaaggtcaagttatccacaaagggaagcccatcagactaatagcagatctctctgcagaaacactgcaagtccgataatagtgggggccaatattcaacattcttaaggaaaagaattggcaacccagaatttcatatccagccaaactaagtttcataagcaaagaagaaataaaagcctttacaaacaagcaaatgctgagagattttgtcaccaccaggcctgccttacaagagctcctgaaggaagcactaaatatggaaaggaaaaactggtactagccactgcaaaaacataccgaattgtaaagaccattgacaccatgaagaaactgcatcaactaatgggcaaaataaccagctagcatcatgatgacaggatcaaattcacacataataatattaacctttaatgtaagtaggctaaatgccccaattaaaatatacagactggcaaattggttaaagagtcaagacctattgatgtgctatattcaggagacccatctcacttgcagagacacacataggctcaaaataaagggctggaggaatatttaccgagaaaatggaaagaaagaagaaaaaaaagcaggggttgcaatcctaatctctgataaaacagactttaaagccacaaagatctaaattgctttctaatgataacttcaagttgttagcagactttgctttgcttaaaacaggtatatcagtcagattttcaccagagaaagaaagccagcaggaaatacatactaagaaaagtattgcaaggaattggtttaagtggttatgatggctggccaggcaattcaaaaatcactgggcaggccattaagaggggcaggctggagctctcaagctaagtccacagccatggcagggcagaagttctgcctcagggcagcctcagttctgcacttaaggtcttttatctgaatgaatctgggccatccaaatagattacggcaatatctcttagttaaagtcaactacatatggactttagtcccatcgacaaaataccttcacagtaatacctcagttagtgttggattgaataactgggtgctgtagccacctaagttgatacatataactgaccatcacagaggatatttcaaatcaatcactggagacagtattgacatgattgtttattcattttaaagaaaaatgaagttaaacttctacataacgcgagtactttttttttttttttttttgagatggagtctcactctgtcacccaggctggagtgcagtggcatggtctctgctcactgcaagctctgcctcccgggtccatgccattctcctgcctcagcctcccgagtagctgggaccacaggcgcccaccaccactcccagctaattttttgtatctttagtagagacggggttccaccgtgttagccaggatggtctcgatctcctgactttgtgatccgcccgcctcggcctcccaaagtgctgggattacaggcatgagccaccgcgcccggccaagagtacatttttgatggattagaactttattttaaataagagcattatgaaagtcataagctgttatgagtaggtaaccatttcttctcagagttctctccctattaattttttaatttcccagaaaatctctgtaacccctctgcctctgtaatcaacaacagtgcctactaaatggtgaaaaagatgaacaaaattagatcaataccatgttaacaaatcaaagtgagcacgagcctacttaaggaatgacaaaggccttatgttggaagcatctctttgccatcttgttgatgtggttgaatgctgtatattaacctaatgttttctttatgttaagttttagttttagtggatttttcaagtattgttttgtgtgtgcatcttccctgcttcaggtactattgtgggccctatgaatatgcaattaaaacctgaataatattaataacaaagataagagcaccaatgatagtctcaatatatgtcttcatggagcttctagtctattttataaaattagaagcttctttagaggacagaaatttgtgttatagatattatgtaggtgaatttatcaaatggtctaatagtaccgtctattgaaggcaactgtttgttccttgacaataactaatcctttctaaccattatttaaaataccatctcctattagtagtaagtttgaattccccttactactaagtattcatcttcctatgcaaaaaatcttcaaatatgtaattttgtacatgagcgtaattacttttattatgcatttttttcttgacaccaaatatttgcactatttcagatgaatgggggataacagttacatttttatctttatcagcgttgtttaattccttgaggtttaaggacttgatcatttagtctgagtctcaaaaatgtcctatggtcttttcacaaatatcatttattttacaataatttatcatgttaatgagctactttcagctttttgtaagaggaaagtcacttacatcaaaaattttcatatatcagataaatgatccatgtggtctctctagtttacctatgttctctgtgcgttttgaaataagccctaatgtgatcattgtgcacaatattatgccaaaatcatcatagggattgattttctatatctcttgtgtggaagctaatgcaaaacaaaatattcttgaaagatggttttaagagacaaaagccctaatattttcttctgaagtgcattttctttggattcttgatttttggcctaaagaaaacataatcacagaccttgaatgaatgatggagacataaatttttagattgactgttcttgatttatagacgtggatcttctgaacagtaaggaaaaattatccatgtaatttttgattatttcttcatcatttatattttatattctgcatctgccctgaggctatttacatggacacatttttataaactggaaaaaaactcataagaatgtataaaaattaatttgatttcttgctatgatatttctacccttttagtcaaaataatcattaccacaacagtcacaaacaatgtaaagcatgtccactattgttacaattttgctgaagcttttggaaacccaggtaggaatacttggtgcatagtaactttcttcccccctgtggaaaattctttcataggactggagaaaggaagtcagtacagtttccaggtgtcagccatgacagtcaatggtactggaccaccttccaactggtatactgcagagactccagagaatgatctagatggtaagactttttcccagttactatcactctgattatcttcttgttatctcagcttcaaaaggtctcttaaaaaaggaatgaactccaactttggggacattgattcttactatatgttcacatgcaaaacacaacagggaaacattagtgaatacatagtcttcaacaatgccatgtaaataatgccagaccatgaatgacatagcattgattatgcaataatcatggtcctcaaaacaagttacttgttttcaagatcatctgaaataagatattttctatttattttattttgaataactgaccttaaccatttcgttcacaagaattagtgtaatttataatagtaatcatgaactataactatataatatagcttctcttgcttttttatgaggcttttgaaaaacatctatatgtatttttttacttgcttatgatattatcattaccttttcttggtataaaagacaacttactttatttgcttagctgatagttgtcctgaaacatttatcagtaggatattaggattcatataagatttatatattaataaattaaatataagcataatcctcaaaattagcaaatgagaaattgctctggaaataaaaacatcatgactaaatttttaaaataaaatttaaaatgaatgggtaatgaagtgacagaataaaacattaaataataaagcagaaatatatagaattagagttagaaatttaaaaggtaagaattcataaaaatgagaggtccttggaaaagaagtaagatatgataagtattcttaaatctaagtaatcaaaactagtgtcaattaaaggtagatgtaaagataaactcgtatgtattgaaaatgtgacagcacaagataattgcctattatatctaacaatgaaattctcttactccttaactgatacatctgaaattattccagtaaaaattgagagtaaaaactctatattcctttcttttcccttccgtttttaaatctctctttccatgtcttcctcactttaactcttttcctagttcttgtattactttctcatgtcatccttcctctttcttgaactcctccatctcattctctttctcctttgtcttcctctttttctctttttgaatacctcactatcattaatgatttttctatagccacaaatttggttttactaaaataattatggtagcattaaacaatcaacagttgatatttccataataatgttaatctctgccatgtgactgcatattaattcaaagaatgtttatagaagtcttactaagcatcaggcaccatgctgagctttgatacaataataactaagaaacacttggttcttttctcatggagcttggagaatagcaaagaaagacagacattttaggtgaagtataggaagttgccattgttgtagttaaaacctgattgggtacttgaaaactacagttcaacttaggatgggtggatggatggatggatggatggtggttggttggttggatggttggatggttggaaggttggaaggttggatagatggatggatggatagaccatcaggcaaacagacagacttgcatttaaattgagacctgaaggatgaataagaattaggtatgcaaaaatacattggcgattgaggggaaggaatagtgagtaaggtaaatgtggtttttaaagtcaagacaatgatgctgtttggggactgaaaaaggccatcaagaatgaaacacagagttggcatatgatgaagtttgtaagataagcaggttccaaatctgacaagacaaagttaagaattttaaacattgtctaaggatgtctaagtcaataacttactttgttttaagcaagtcctcaaaggttgatttaaaaaaatagtgaattaattagaattgcattttgtagagattactctggctgaagcatgcacacacaaaaaagtattctaagtaggcaaacccaggcaatgactttaagacaaccctagaggtaatataggagtttaaaaaaagtaacttgaggcttagagatattatttaacttgtcttaggttatataattgaaaagttgtggagctagaaaaagtcacatttcacagagttcatacccatcactaatagcttagaaaactttcattcatgtgtttattcaacttacatttcttattaaaggtctatatatgcaagatattaccttaggtactagagataaaacaataaataaagtctatacacccaaggagtataagttgtattcagatggaggtagatagtgataggtgctctgaagaagcatggtagaggggatagcaaggattagaaactactgctttatataaggaactgagaaaatctttctgtttagatgaaacatgaacccagactttaaggaagtgaaggggaagccatgcgaataggtcagactagagcccttcaagtagaagaaaaagcaagaacagtcatcctgaatagagcctaattggtgattgagatatatatggcaagaaggatgccaaagtcatgaggttataatttgtcttatgtaaaaaaatagaagagtggtcacaataaactatataaatagttatttttttctattttaacttatttacctaagaattaagcttcaaattttatagatttatgttttatcctttcatctacccttatgaagtatacattattagccttattttatgggagactaagttaagctatgaaaatttaactaacttaatcaagtagtcagctagcaactgtggagctcaaaattaggttttgaggccaaggcaggtggatcacttgaggtcaggagttcaagaccagcctggccaacatggtgaaaccccgtctctactaaaaatacaagaattagctgggcgtggtggtgcatacctgtaatccctgctactcaggaggctgaggcaggagaattgcttgaacccgggagggagaggtagcagtgagccgagattgtgccactgcactccagcctgtgagacagagcaagcaagactccatctcaaaaaaaaaaaaaaaaaaaaaagttttatgctttgaggtccagtgtaggtgatcagagaaaagcctccactaatcctgtagaaatgacttgatgaccataaacacagtgattcaaggcaaacaaacgattctaagaagtgagatcacgttatttacccaaacctaaggggttatatctcttactggaaggagagaaaataaatgaagcagaggtgctgaaggtcttacaaaatatccagaatgaaacagacgctctacttgacttatgtgctctttttcctgactctgaatgagtcacaacttaagtagaaccaaaatataaagtcaccacttattagaagacacaaaatttttcatttaactccatgtttttcatatcaatgcagtctaactgtaatccaatttatgcatctatttcaatcaagaatctctatgccatgctcatgagagtcttaataaatgcttttaattggatttgtttgaacttttctatgctcttggcttaataatggccctcttgtacatgcaacattccttctttttctttgggtatggttgtaattattacaaaatatggtttaagaatttaccgtgtgctgaatcatggggagtacaaacatgaaaacagcaagaacagctctattgagaaccagacagataatggctgcactgattagaaaagatttcataaaaacacgtagaacttgaactacaaacttcagagaaagggggttctgacagctaggattgtagggaagtgtgtgtaggacagcatagaagacatttttcaaggaaatattgccttgagaaaatgatttctgccactattaattcaaaatgcatcctcactcatccaactgttactcccttaccagtcaattgtcaaaacatatttccacacaaatatcaacttttttctcattctcttatgttttcttatggatgagaattgcaaagacagtcttatcctttcctgtgatatacacataagcaatctgaaaaagataaataaaaaattaatagaagaaagacagtagaattgatacttcttgcacaaaatgctgttacacgttatgatttgagattgttcacatttagacataatgaaaactaaaagccatttcagagcatttaactgcataaatatgtgggatgtgtatgttttacttgctgtaaaaaattgataataccaaaggccttctcaatttattgatccatgatcactttcaactgtgatacttcctcaaagtgattttggtttcctttctttccttctggttttcttcttttgattgcaccattcatatattaaaaagtgtaacccttgatggaaattaatatttgaaggaatgaacaagatcaatagtggtcactggtaggtacaaaagaacattcaacctgctagtttgctctatttttaaaaagatttccttaaatattcatctcattttaatgtatttgtgtaaatgtttaaatcataaaataaggtataaatgacttgcaccaaaagtttcttggctaatgttggaaagctttgggtcctaaattttgagtcctaacactctgaagtgagaaatttccatatagaattgctttgatctcccaaaaattaaggataaggagaaaaagcaatcattttaaaccacatgaaatgggaggcattctttgctgtagctgaagatatctgtgttggaaggtaactgcatcattaggcctctctggatgcattatgttgtataacttacccccctgcttcagagcctgatggtgatcgccaagagaatgatctactcattactgcataactctgagccctgcaagtcagctaaacagaaacagtgctatttgcagattgttaaaggaaacccctgcctcctgtgacttctgtagttcctcttgccttctcaacttggcttaagcattgtgaagataactgtagcttggagaaataccccaagtcctcttggattgcccttttaattagatgttttgttaaagtaattataaaaccaaaccacattgtttgttcagcgttccctggaaagcacgttgctattactgacagctgggaagttttaaaatatttattttgtgcctcaaaatttcagcttaaaaaaaaaagcaaaccaagatcattagaattccctagggttttcatgtaaatgtcttgcataaagaaatgagagaatttgtgatagagtgatagagttcaacaaagtatccttcaagaaactgagcttggaaatctgtttatgatacttttgtttttggagtgaagaggtgaaaattgctatacgctatcaataatcatgtgatttaaaatcgactctctaccctgaagtggaggagtttagctatcaaaagtcggcagtgcagacttaagaaagtgcaacagtgatgcagcaaaaaaatgtgaatctaggagctggccctaatttcttgcccccaggaaataggtaatcagccttattaacccaaactggtaataaatgggttcgctgcaaattcatttcatttaagaattggggtaaggagtgcgatttacaccagtgagcaaaagaatgtgttcttctggtgatttcacttgatgctcatatgggatttggtgtgcacagaggagtgaaggtggcatgtcatagaatagattttctttcttgtacttttgatagggaccatttatgatattctgtgatttatgatatgctatgatttatgataattgacagataggcttggggaatttgatggaccagtggtacagtagctattccactgtgaaatttaagactcagccccttattaccattcaagtggatttcatcttacacataaggagcatagcaggcaaagcaaaaactgatttttaaaagcaatatggtatctgtttcagttccggtgcaagtggttgttcagaatctcaaagttccactgtacaaaggatggcacaggttgctttgacttagataaaagttcagtgaagttgcaagtattttacttggttataacaaactttaatgtgcccatggaatgtctgatccttctatgagttgcttgacttttttctaagtaccatgtaaaggatcaggtgggttttgcagtcttaatgactaggtttggatccagctccatttaccctatattcttgggcaaataactttcccatgccttggtttttctcatgtgtaaagagggcataacaacagtatccatcacagtgggtttttgtgagaattaactatgataatggcaacaaagtgctcaacagtgtgttgttcttctgatttttctggttttgatacataagaagatctcagactttgactgttgtgttgttgttgttgttgttgctgctgttttagacagaatctggctctgtcaccaaggctggagtgcaatggtgtgatctcggctcactgcaactttcacctctcgggttcaagtgattctcctgcctcagcctcctgagtagctatgattacaggcatccaccaccatgcttggctaatttttgtatttttagtagagacagggtttcaccacgtgggccaggctggtcttgaactcctgacctcaggtgatctgcctgcctcttgaactcctgacctcaggtgatctgcctgcctcagcctcccagagtgctgagattacaggcatgagccactgcacctggccatgactgcagttctttctgacagtaatatgaaatactcagaccattggttttatgaaacttctccttgttcatgatggtaaagctttgttgtctacatttagggaacagatgtatccatttctgttacaaaaggagagtgtacattcagtacatcttaaaagcccatcatctaattaaggtataatttaatggggcatcatataattatagcaatagattgaagagggcgttttgtggaattaggcagttttttaaaaaaatattataggaatataagcaagctttcaaaattgtattgtttttgcaaaaaactaaaacattatgccaaatggtaaaatactaaacacatttgttttaagatccaaacaagcttaaaaacttcctacaatttctgttattaaagaagatagaggttttggcaagaaaaactttaaaaattcataacattttattacaaaaggaaagaaatcttattattataaatggtgttattgaatatttgaatattacaagacactgcactaaaaacctattagagctaataagagaatttaataaggttgtatgtttcaaaaacatagcttttctttatagtagcaataattagtttaaacattgaaaagaaaggcatttataaagcaacctaaaatataatatctaggactaaatttaacaagatgtaaacaaatgtatatcataaaaaatacaacattttactaaaaactataaaagacatgagtaaatagcaagttacatatgttcctggatgaaaaaactgatcattattacattagttatttccaaatcaatgaataattttagacaattctaatcagagtaaattttaaatgattaaggattttctggggtggaaaaagaaatttatatggaagaataaatgtaaaagaatcccaagaaattttggaaaaggataataaaaacgtttactataaagcctgatttagaatcagcatagtactatctggcattggaatggacagataaatgtaacagaacatagaaacagcccctatctaggtatatttgagaaataaatataaaaataaagctggcttctcaagctgcagattagttactaaatagtgtgaaactattgccagtacttttagcagaacagaaaatgtttttcttctcttacatcaaactagttgacagtggttgattctggtgatggaactgaaggcaaaggagggtaaagtcatcacatcttatataattcaaaactggaaaggccccaggtggctgtaaggattttgtcatcattttttcttcaggtatttttaaatataacaaagatgggtgactcaaccacaagtctttttatacaattggaggttttgatctgatctttcaaagtatcatttcccttaagattgattgtattcttcactttgtgactagtaccaataatcacttgtcatccaagccaaaagcctccctatcaccctcaactccatttcactccctgtcaatatccattcaatcaccaagatctgtaatttctaccttcagaatggatttggaatccatcctcccttctccacacccaccaccacactttatgtcaggctcacatcatttgtcacctgaaagtagcctcaggtttgctatttttctggatacctgtttgctctccctcctctctagaccccatagtgttgtcagagtgattttttcagaaccagatatgacgatgtcagttcgctgctcagattcttctccatgtggtccttccctcagcctcaagtgtgacatcccatcctgcctgcctacctgcactgccctccaggttcacttcctcagctgcatcctggatcaagcctttggacttagcaagctctttacccaagtgtattttcacatatatttcacacctgcttgtcctttaaaactcactagatgttttacttctaggaagctttctcttatctgagtttcactcagatgtcttttctctaaacacattttgacactcttctcaatagacttgaaacaaagaccatgctttgtcttgaacttctcgatatttcacacagtgcctgctacatagtactcaataataagtggatgggtgaatgtaaaatattcatagctgggtatttgtgtgaaatgtgtaacacttacatagtttgattcttcactgattttcatccttacatacgaactctaatttcagataaatgagctagaaacatccattgctctctgttgtattttttcataaatgtagaatgcatcctattatgcttatatacaatatgaaaatgaaaaccctagctttctagaagacagcttggcataagattttagagttacaatggtgtttttgtttgtttgttctgagacaaaccaataggtctgtagttttgagagcatacggtttgaatccacttcaaggaaaatgagcctaaagaattcatttagcataccacttggcaaggactaagatctctgcctccccatacagaataaggtttacggtttgaatggccatggagattattcagtgtaaggtagctgatcaaatgcttcatggtagaatgatacaaagttctagtgaggttttgcaatagttgaagctggtatccttaaactctaaagtgagagaacaatccccagatattgaagggctggtgtctgcagctgctccttgaaagccacatcaagagtatttgctctaacagtcaggattaggttatctcagtatttcaggaagttggcagtgtttaaataaaaccaaacttcattgtattttctctgtattgtgttggacatgccaacctgctaccctaaatatgtatcttaactccctggtgattcttgtcaaatcaagaacttgatagacagagaccacgcttgtctaatttttgggccaaaaaagggctgaatcctatctgtaatctggaattgggattctgcagctttgctgagcaagagaaaatcaaggaagggaagaatcttgatggttttgttaggataaaccttgggcatggcattgagggtctcttccctaaaaaatactttacatttttccctctttttccttttgagttataaccaatgtgaggcaaaggcaagtgtacaaaggtgcagagaggatgtggattctggtgaattattttagcatctacgtttcttttcactaggagtaagcgtgttgatattgggaattggaggacatgggagaagaaagattctccatccttagatctaccagtttaattggcttagatttaggagacacatattttcagaattacaattcattgttgtggttttcaagaagtagagctgtcaaaactcccttttaagagtgttggctaggtattcatcgactcctgttagacttctacattctttttctatctaggcaaaaaaagtagctaaaaataaagtaaaatatgaaataataagattaggttgacacaaaactattaagataaatagaaaacacatattaaaagtaaacaaaaagacaaaatgcagttaaaaattacaaaacaatgttgaactgtaaaaacttgtggtagtaacaaaatttgtagaatagctaagagtacaaactatatgtgaaatgctacatgagcaaaagtttgttaaattgatgagtatgacacatgcataataggtctccataaagtttagtcattattaggaacaagaataaaacctatatggtttgaaaatttttaatgatacaaatcaataagtaaatattagtaggaataactgattttccattcatggaggggaaaatattaatgttcattattaaaattaataatgagagattgggggagggcttgactataaaggggcagcctaaggaaattttggcagtgatgggatttttctgtattatggcaggagtggtggataccaaaattttacccatttatcaaaacccatagagctatgtaccactaagtaaatgttgctgcatatatatttttaaaataaattaaaaatgaatattcccagcctgggcaacacagggagaccccatttctacaaaaattttcttttaaaaattagccaagtgtggtggtgcatgcctgtggtcctagctactcaggaggctgaggtgggaagatcacttgagtcctagaggtcagggctgtagtgagctagcattgcgctactgcgctccagcctgggtgacagagtgagaacctgtctcaaaaaaaaaaaaaaaggagaatattgacaaaatattagaaataggatggtaaaagaatacaaagtagagttcagtggtgaatagaagtggttgtccactatgataaatacacaaacagcctttaaagtttatagaggtgagcggcctaagggaagtgatgtcctttggtgagaacaggccctgtctatagaaatgaacacatttgtaagcatcagacatgcctggaaaggcagagtgtgggtatatcaattgccttatgtagtttgctgtaaagaaatataggctattgaggactagaacaaaactctaacaaaatgatccataaaatgcagcacgctaaatggaggacaaatgtgtgaatatttgtcaaaagttccaactgcctgacacaacttgacagtgccatctatagcaggcagtatgtggtggcgactgcttgcattaccaagatctggcacagacaaatcttgctgtcccctaagaggaaaacaaagtatccagtgtagagtagatggctggagtgaggtgaacgaaggcaaaatgacaggtgaagaaggtaggagataagtggagagagagagagatcatttatggccttttaggccattgtaaagaacatggcctacaatgtggtttgagaacaccttggggggttttgagcagagcaataacatgatcttaattgcagttttctatatacatgctcacactatatctgtattcatacacatttattttaaataccacatatatgctgatggcttccacatctgtgtatatctagccatgacctttcaccaaaatcccagacttacatacccaactacttccttgagatagccacaggtttgactaataggcatctcacattgaacatgacccaaggaaatctcacctgtgtttcctcatttcagttcatcaaccaacagttaccaagtcaaagacctatgggttatgattaaatctcccttttcctgcaccactcacatctactctatagctctgttaactacacattacaaatgtcctaaatctatccactttatatcatcttcacaacagccatctagacaagagcaaaagcaattttatggtctccatgtttcattctatgcttcctctccaaacttctttttcacccagaaaaatagagtgatctttcagtaatatcaatgagaccacacttcacacctccattcctgccagtcaagaccatttaagatcttctccttctacttagaataaaacctaacttcttacttatcttgacttgccttgcctacagtaacctggtctgtaagtgactcactctcttttttctgtttttgtaattgtttacaattatggaaaaatagacaaaaccttaaatttaccatcctaacaatctttaagtatacagttcagtggcattaagcacattcatgttgtcatgcagccatcaccaccacccatctccagaactcttttcatcttgcaaaagtgaagtgctgtacccattaaataataactgccaacctccccaacccccagcctctggcaaccaccattctcttttctgtctccatgaatttaacttccctgggtacctcataaaaggagatttacacagtttttgtcattttgtgattggcctatttcatttaccatatcattgccaaggctcctgcatcttgtagcgtgtctcaaaaattcaattgtttcctttttagaggccaaatactattccattatgtgtatataccacattttaaaaatgcatttatacattggtggaaactttgatttcttccaccttttggctattgtaaatgatgctgctatcaacatggatgtacaaatatttgtttgagtccctgctttcaattctttttgcatttatacttagatgaggaattgcaggatcatatgttaattctattttaaatttcttgagggacccttatatggtttctttatagcaggtatactactgtacattcctactggctgactctctttttatctttttcattctctctcttacccttgatgttccagatgtgatgatcctctttggtttctctgaataccaaactcatccctgcagtacagcatttgcagtagttgtttcctctccctacagagctcaccactctgatgtttgcttgactggccctttcaggtcatccaccttagactcaaatggggagaatttcctggatgggtcagttattgtcccatcagcatagcacttatcaagatctcacgattgtcttatttgtttattaggacttatgttttgtctttcctctcccaccactatatttttagtacctagaactacaactagtatataggagatgcatagtagttgttgaaatgtcacagggattaatataatacatgaccgagtatgctgcatgtgaacattacacattagtggaaacctgtgtaacatgtctgcattcatgttacagagaataacacgtctacatatattacatatgttacaaagaataacatgcctacatacatgttacagaaaataacatgttctttagaaccaaactataccaagagagaatccataattcaataatataatcaagagtggcaattgacctagttatttgatcattcagactctagtaaaaatttggggccttgtattagtctgttttcatgctgctgataaagacatacccgagacagggcaatttacagaagcaagaggtttaatggactcacagctccacatagctggggaggtctcacaatcacggcagaaggtgaaaggcacatctcacatggcggcagacaagagaagagaacttgtgcagggaaagtcccctttataaaaccatcagatctcaagagacttactcattatcacgataatagcacaggaaagaccgcccctgtgagttaattacctcccaacgggtacctcccacaacacgtaggaattgtgacacctacaattcaagatgagatttgggtgggaacacaaccaaaccatatcaggcttcattaatttaaatatttcaggcaaaatgtgctctttggtttcaaattaactcaataactactctactattcctctgtgcttcatatgtgcaagcagcatcttagagatacttgtaaaatgtttcatgtacttctgagcagcaaatttcagttgcagactccaagcaagtaatagtcatattatatatcttccacagcaaattttctaaattgatgttttatagttcattccagtagtaaccactttcctaatccataaggtcatctatgttagagaaaaatcactcaggtagcataaaaggaaaattgttatttctgcctttgtattaagaagtgagtgggcataaattggctatcatggattatgaacaatctcctggcatagttatcatgatgatgaggccatatattatgaatggcttaggtctaatactaccttgaaggaactgtccttttggtcctgtgagcttaatttggtgataaagggtcattaaggctgggcatgtagactcacatcgataattccaacactttaggaggccaaggcaggtggactgcttgagtccaggagttcaagaccagcctgaacaacatagcaaaactctgtctctacaaaaacataaaaataaaataagtagatagataaatacattagctgggcgtggtggcacatgcctgtagtcccagctactagggaggttgaggtgggaggttggcttgagtcagagggttagaggctgcaatgagctttgatctcaccactgcagtccagcctgggagatagaacaagatcttgtctctctctctcaaacacacaaaactaattaggatttagatgaagaggcaacatatcttcttacgtactaacattttttttctaatgttaaaaattattttgaggcttgcctctaggattgaaacattttcatgcagtgaaggataaagtggagtcttacgttcttcaagagccagttggtgtacacattacaatgatatgtttaaagctccgatgaataaaattgtgtagttactaacttaaccaatttgcaagagaactattctatggtttgcagaaatattaagaaatagttactgttctgaaaacatttttaacagttgaacagtttttccttttattctaaaagatgttaaatattgtcattaaaatcattatgatttcatattgcttttaaaaagtcataaatgcagaagatctagtttattttcttagtgtacgattaggcagattatcttgttgttttaatagttagtgcaaacacttcaaatatgctaaacagaactgactgagagtccattacatttcaagggcactggtgagactgtggcagtagggttgaaaactattaatccatccttttcatctcttttattacttttacttagagtttatattaggaaatatttcacaaacattgtgtttctgctgttaaggcttatatccacgttttgagacataatttttttatgatgtctttgcatattatatcataggcttttttagggcagactaataatagctttccctttttgcccacaaagggccatctttgggggaaaaaaaagcatctttagaaaattctgtcgatgtggcaactttagaatcttttgaaaagctttagaatcttttgaaaatgttacctattttgaaaactttaataagaacatgcttctatctatcacttaagctagaagtgggaatgctgcatatggataaaagtggagggggctgtgccagtttttggtactacattaaggagaaaaatgtaatattacctctagtcatcagatttccttgcataatttggcatatgttaccttcagagattttctaaatcactggacacagacatttctggaacataaataatgaacagaatcactttaataaaattcaaatcactgatatttttgagtacttattaattgccaagaactgtgttaagcacttattgaagtttggatgggcacattctttcttacatatctttgcataatacttccctgattttcaaagaataggttacatgtgcttgtatttagccaatcaaaatatttaccataatctatcgtagctgcctttttacttgcctgtttctcattagactataaactccaatagtgcaggtttaatgtctgccatatttgttcttcctgtatcctgaacattacaggcacctaggctcacacctcaaacataataggtgttgtataaatatttattaattggctgggcacgatggctcaagcctgtaatcccagaactttgggaggccaaggcaggtggatcacgaggtcagaagttcaagataatcctggccaagatggtgaaaccccgtctctactaaaaatacaaaaattagccaaatgtggtggcaggcacctgtaatctcagccacttgggaggctgaggcagagaattgcttgaacccaggaggcggaggttgcagtgagccgagatcgtgccactgcactctagcctgggcgacagagtgagactccgtctcaacaaataaataaatattaattgaataatgatcagtgtccagaaaaaaatatttttttaagactaggaaacagcgaagaatgacaacataaaaatcagaacaatttattattaaaacatattaattttcaacacacaatccctttaaaagaaaatatatgtcagggtggcatgcacattctctttttaatatctagcaatatttgagaatttatttgctactcataatgggtaagtttgcatgaattatctcattaaatcttttcaacaccataccttcattctacaggtagggaactgaggcttagagaggataaatgatatctcaaaatctcacagacagtgagtatacaatacaagtttgaactctgctctttcttacttcccgagctcaagctttgagtcaatcaatatttggaatgccaacttaatcagaagggaaactcagagaagtgaaataatttcatgaggacacagagctggtaaatgacagaacgtggcattaaaccaaatttgcacaggtccaaaggttgtgaggctttaatccaggccactgtcttctttcttttaataataaatgcatttttcactgatttaataaaccatgaatcaagtaccatcctaatcatgctggacagatcatggcccttaactgtttctcctgacaattacataagaaaggactggttagtttgttattgtttttagctaaatcagagtaaataattattggataagacaacattgacattttattttccagtctattattcttacatctgccttggttttcacccttcattaatgatacctaagaagagatatgtaaaaagaaaaaaagcccaagtaagacgctattggaataaagatgcattgatgctacctaccatgcccatggaaagaactcggtattcttgtatgcttaagaaattttgtgaaagtcaaatcaaacatagaaaatatatcatatgctaaaataaagagtgacttgggcaataggtgatgcattatttatgcatctatgaaatatgatttctcttgcttaaatggtgttctgccgtgctacattttctgttatgagacatgctgatgatgcctctttttgaatgctagaatctcaagttcctgatcaaccaagctctcttcatgtgaggccccagactaactgcatcatcatgagttggactcctcccttgaacccaaacatcgtggtgcgaggttatattatcggttatggcgttgggagcccttacgctgagacagtgcgtgtggacagcaagcagcgatattattccattgagaggttaggtgagtatctgtgattttttttattctattaaggggaattaatgatttattttgaattattgtatttcttggaaaactgttccctggtatgatggtttcaacttacagcatgtattagctctgaaagcaactgtctatctacacacacacacacacacacacacacacacacatacacacacacacaggcacacatatacatttctttgaatttgggatttcaggaatttgatctagagagatctgtaatggcagttgctctggtgtgtgcccttgcttatgggttataggatacaaaaagtgcgttgggccatttttctttttccagtggtcaatggaaacttctgatcctaataatttctataaaaagaaagtcaacacatttttcatctttgttgttgtcactgggaaaatgttctgttaatttttctttaaccttgaaatatctagtcatagtgccttctttaccgttaacattccaaatatgaatgttaaaggctgtgtcattatgactgcaaaagaagatgaaagaaggaattttcagtcaagacaatacattagaatgataaaactccatcctgcatgtttccctgcccctaccaatctaggttctcttattgtactcaactcaacctcattttttactgaatacaatacttcagttgtgatattctgaattcattgaaaacgtgttcattcagagaggtctaatgtgtgtaaaagtgttcatattcattttagatctgatttcccatagtgctgtaggagtttgtattattaacacagagaaataaagtaaatataatatatcaggatgccagtaagttaaacaattttcataaagcaaaatgtaagttgattctacctgttgatttaataccgtattacatgaccccactggaaatgcagcttgattgggcaggcagggtgtagggggtggggggatctgctacttatttgcagtgtctctcacaaacagaacatttgtgatgagaagcctgatttgaatttgaatagctaaaatgcagtagcaagaaaagattttctcagtaaaggaagaaaattgcactgacccattctctctataattgcttcaaacactaataagagaaacacctactggaaatctccacaatttatttagcttggcgtttagaaataatattctttccatcagttcctgagtttgaatgtaaaggcaatcacaaaactcatattttatggctatcaagcctatgtcaagggactctcacttatccattattcagcatccaccatctttgacagttcatcttgatgccactcaacagacagagggagggaggtgcccatggcagtaaatggctcccaggcaatgagaatgtgctgcaaactcagaaggaagtcaggagggaaactgcattgttgaccctatcctttttctaatgattctcttcgttaccaaaaaaaacttgccagaggtctccaaatttagtcaagttgacgcatttgggagattaacgttggcaaatctccccaaatgcttaacaagaaaaacagaaaactctggaaaatatattctaaagagctaggaatatttttaaaggtaaattgggatatgaacctgtctcagtaataattatgagtttgcactctacaacttacctggaaagagtaattacatacacacatagataggtatgtaagttctactagttgatactcttttaacatagtctcatgtgttaatatgaaatacagtaattagcatgttgttgttcattaaatatcctcatggttatgcaaatgaactgctatttttccaatatgtgttttcactatttagccaaagtgtgtgtgagagacataccctaagctctaatctttataaagataaggatttattcaagtccacgttcatgctgcaaataaatcaccaattgttttatttattctattgagcattaaaatcaacacatcagtttccatagtaactttttgagaaggtatttataactttttttaatttttaaagtttttggaaggcaaagctctctagtcattacatatacataataaagaaaatgaaattttatgttttaaggactgtatgacagttatacaactaaaagtgaattaaagtaagtttaattcatttaagcatagggtcagccataacttcaagtatcatggttgtatattaaactataaaaaagctatttgttttataattgactaataaaccccttcatctatttcatgagagagcaagacttctaaacagcattttatttgcagtttagacaccagacactgtgatcagcttcaggactggaaatacaagaacattttgagtaatatctaatattacctaattaaaagcaaacaaacaacttgcctgctataggcatagagcttcattaatcaatgactattaaatatttataattaatctattgacattttactccttttagttcaagagccctagtgccagacttgaagtatgatatagacccaaaattaatttgaaaccaaaccacttttaaaactcactatctacctaccaattgatctatttatctatcaatttatctatctttatatctttattcagatattatttatatacagtacattgtgtacattaaaagtgtactttttggcatttttaaaagagcattattgaggtataatatttgtttaataaagtatatctttataatttctctaatttatctcagtaatattttatagtttcaaatgtaaaggtcttcaatgtttatgttaaacttattcctaaatacatatgtatatgtaggaatatacatatattagaaatacccaaatatatatatatatatatggatataaatacatatatatttggatatatatatttgaatatatgaacatatatttaggactgtttaaattatgcatatatatttgaatattcctaaatatatatacatatgtatattatatatatttgaattattttaaatagaactgtttttaaaatttattttaaataaatttttactatagtggatttatagatgtattatataatgtatatatagatgtattgtggtatttataaatgtgtagaatacaagagattttttaatgctaaccttgtatcctaatatctgctaaatttacctatatattccattagttttttagattatctaaaattttctgtttaatcaaacatatctatgtgaacagaaagttttatatttagtttctgatctctgtcccttttatttctttctgttgccttatttcagtgattaggatctgtagtaaaatactggataaaagtgctgaaagcaggtatctttcctttgtgtctgatcttaggagaaaaaaatttagtctttaccatgaaataggttattacctctggtctctttaagccttttgtgagattaaagaaatgctatactctttctagttttctagaaattctggtcatgaatatttgttgaattttattagataactttctatcttttgaaatgaactttttttttctttttttaaaatacggtgaattacattgattgatttttgaagggtaaccaaccttgaatttcctatataaatcctgtgtggccatcatgtattatccttttcttatgttgtttaatttgatttgttaatgcttattaaggattttttgtgcctatattcagtaggttatatatttgtctacaattttcttttcctatagtgtctatatactgtttctcttttactccagttagattggctcataaaatgagctggatagtatttactccccttctgttacagaaaatttgtgtaaaatggattttatttatttcttaagtattttatagatttcactaatgaaatcatctggacctgagattttttttataggaaggctttgataatagatttaattttttatacagatataggtctgatttgcaaactttcttgtattgattttgctaagttaaatttttaataaaatccatccatttcattttgtctcttgttggcacagttattcataatgttttctttatctgttatctatggttattaactgatttttcatttctcatattggtcttttcttgttcctgtcttttttttgtgatatctagacagagatttactaattttgttgatcttgtcaaagaaagagcctttgacattactaacttttctattatctatctattttatttctttcatttctactgttatcttgactacttccctcctgatacttattttagttctggtcttctcttctatttctaatttattgacatatgaactttataatgtatacatccattgttgttcctctaggtatcattttacttgcattccacaaattttgatatgttgtatttttattaccatttagttcaaagcatttcctaattttcctgtgatgtgttattctccctaagttatttagcaaggtgttacttaattttcaaattttgggattttcctagttatcttgttattattggttttcttttctttcttttcgtttttcttttttttttttttttttttgagccacagtctcactttgttgcccaggctggagtgcagtggtgtgatcttggctcacttctacctctgcctcccaggttcaagcaatctcctgcctcagcttcccaagtagctgggattacaagcgtgcgccatcgtgcctggctaatttttgtatttttagtggagacggggttgcacaatcttgtccatgctggtcttgaactcctgatgtcatgatccatccacctcagcctctcaagtgctgggactgcaggtatgaaccaccacacccagcctaaatttgagttattaatagcactttagcaatatgtctgatattgcatattgcagtaagattatattgcatattgcagtgaggttgcagtgagccaagatcttgcctttgcactccagcctgggtgacagagcaagactctgtcttggaaaaaaaaaaaaaaggaaagaaaagaaaagaaatatgtcttataagagatcagctgactttttctataatggaccagagactaaatactttaggcttcacagaccatataatagtctctgtcaccactcctcaactctgctattagagcatgaaagcagccaaagacaatacatacacaaataaacatagctgtgtcctaataaaactttatttgtggacccaagaatccataatttaatataatttttatatattataaacttttatatgttataaaattctgtcttttttaattttagcaactatttaaatatataaaaaccattattaactcatggtctatacaaaaacagtggcccctcaactataatttactgattcctgctcttagtgattgctctaggagataccatatatgtatttaatctttcccactttatttaggctaacattgtagcacatcatataaaacatagaaacctgcaactgcacaggtctctttatcatatggactattccttttgttgtaattgtcatatgtattacatgtacatgcattgaaaatcccattagacagtcttatatatttattgtattatgcagtcatgaatttttttaagacataaggggaaactatgatgttttctatttacccagatatatgacatttcttatgcttttcatttgtacctgaagatgaagttcttatccaatgttatttccctttagattgaaaatcttcctttaccatttctttgtagttcagtcaggtggcaacaacttttcttcgttttgctttatctgaaaatatcttaattctactttttttttctgaaggatattttcactggatatagaattccgcattgacagattttttttttcttttctccagttctttcaagttgttgtctctctgtattcttgactctatggtttttgatgaaaaaccattagagttttagaccatggcaatttaatgtaattatacatatggttgaattttatttttgtttactgtttgtcagattgcttttttgtgtccctgttttccctttcctgacttcttttggattatttgaatttttttgttttaagttttattattattattattttttcctgagatgacatgtggttctgttggccaggttggagtacagtggagctctcatggctcactgcagccttgacctcccaggctcaagtaatcctgctgcctcagcctcctaagtagctaggaaaacaggcatgtgtcaacatgacattcaaaatgttgttaacctgtagtaatatatacttttttatttttttgctgggtgcttttaagacttctttaaaatatttgatttccagcagctagattatattatatagaggcatagtcattttttactatatcttgcctgtgtgttttatgcttattaaatctgtaaatttatgatttcaccaattttggtcattttgtcttcaaatatttttccccactattcaccacattccctctgagactataattatatgtattttagacatttgaattttatcttatacattctcacaactgtgatgttttctttcgttttttaacctttttactcttttcttgatattgagtgatttatcctgttctattatcatgcttactgataaattccttcattacctctatctcattgttaggctcatatggtaaaggtcattatattttaaaacattgtcctctttttaatattacaatctccatttttttctacattttctactactctgttgagattttctatactccttgcaagtatactttacctctgagagcatagttataaaagttactttagcatgtttctctgataatttcaacatctgcaccatttgggttgggcatctatttgctttttcacttgagaatggactatatttaccatttttttggtatgttgtataattttagactatatgttaggcattgtcaatgttaagttgtagaatctgagttttattacaatccttgaaaattttttgatatattggttttagaaggcaatcaacagttagattcagattgtgagatctatcttgctttctcttcacagcaattaaaatcttggttaagtttcccaaggctttgctctgctgttagtgtttaggctgagacttaggcaagttttaactcagaatcagaacatctctatctccagaactcctttttgtatactttttgtaaactgtttccctcatcccctgaaactactttcagtgattcttctggcacaaagtggtgagggtttctactggagtgacagctgacagtactggggtgctttccatactgcaaaattttcttggagcaaaacagaaaactaattccaacgctggtcgcttcatcaagatcttacttaattccaaaatccgcctagttttgtaaaatactcagacctcatatagttgggattttggtttttggggggattgttttgtatcttgtttagagccagtggctgttatcagtgagatggatgagccaaaaagagcttacaccatcagagaataattggaaactcacagtcccattttaaatatttttgggcagctgttattgtgaacattcttgataaaaataagatgacttcctgggcagtgtatttaacatctgaattacatttggcactatcgcacttatttactaacaacatgtgttagaggaactaaaaatgactctgaaatatataacttagttgctatattagtctgttttcatgctgctaataaagacatacttgagactgtgcaatttacaaaagaaagaggtttaattggacttacagttccatgtggctggggaagcatcacaattatggcagaaggcaaggagaagcaagtcacatcttacatagagggcaacaggcaaaaagagagcttgtgcagagaaacgcccctttaaaaaaccatgagatctcatgaggctcattcactatcataagaacagtgcaggaaagacctgttcctataattcagccacctcccactagattcctcctacaacatgtgagaattgttggagttacaattcaagatgagatttgggtggggacacagcgaaaccatatcattctgcccctggcccctcccaaatcatatgtcctcacatttcaaaaccaaacatgccttcccagcagtcccccaaagtcttatttcagcattaactcaaaagtccacagtccaatgtctcatctgacacgaagcaagtccctttcgcctatgatcctgtaaaatcaaaaccaagttaattatttcctagatacaatgcagggacagacatcgggtaaatacagccattccaaatgggagaaattggccaaaacaaagggctataggccccatgaaagtccaaagtccagagggacagtcaaatcttaaagctccaaaatgatctcctttgactccatgtctcatatccaggtcacactgatgcaagacgtgggttcccatcttcttgggaagctccactcctgtggttttgcagggcacagcctccctcctggctgcttttataggctggcattgagtgtctgtggcttttccaaatgcacactacaagctgtcagtggatctagcattctggggtctggaggacagtggccctcttctgatagctccactaggcagtgccccagtagggactctgtatgggggctctgatcccacattttccttctgcactgccctagcagaggttctccactgccagaaacttctgcctggacatccaggttcccaaaccccaattcttgacttctgtgcactggcaggctcaacactacatggaagctgccaagacttgaggcttacacccactgaaaccatggccctatctctacattggcacctttcagtcatggcaggagtggctggaacacaaggcaccaagtccctaggctgtacacagcacagggaccctgggcccagcccacagaaccactttttcctctgaggcatccaggcctgtcatgggaggggctgcactgaagacctctgaccagccctggagacattttctccattgtgttggtgattaacatttggctccttgttacttatgcaactttctgcagctggtttgaatttctcctcagaaaaatcggattttctttgctatcacattgtctggctgcaaattttgcaaacttttatgctttggttcccttataaaactggatgcctttaatggcaccaaagtcacctcttgaatgctttgctgctgagaaatttattccgctagataccccaaatcatctccctcaagttgaaagttccacagatctctagggcaggggcagatgccaccagtctctttgccaaaatataacaagagtcacctttgctccagttcccaacaagttcctcatttccatctgagaccacctcagcctggactttattgttcatatcgctatcagccttttgggcaaagccattcaacaagtctctaggaagttccaaacgtttccacattgtcctatcttcttctgagccctccacactgtttcaacctctgcctgttacccagttccgaagtcagttcccacattttcaggtatcttttcagcaacctccaactcctggtaccaatttactatgttagtctattttcacactgcttgtaagacatacccaagactgggcaatttacaaaagaaaggggtttaattggacttacagttccatgtggctggggaaacctcacaatcatagctgaaggcaaggaagagcaaatcacaacctacatgactggcagcaggccaaaagagagcttgtgcatagaaactcccttttttaaaaccatcaaatctcatgagactcattcactatcacgagagcaatgcaggaaagtcctgcccccttaattcaatcaccacaaaccaggttcctcccatgacgtgggaattgtgggagttacaagtcaagatgagatttgggcggggacacagccaaaccatgtcagttgcaaaaatagaattttaaagcaatcttctcactaaagttgaacttctgactagtaattttaaaaaactgaatttggcttaggcagttaaataatcattttataaagtatagtgttcaacttcttaaacaatggaaaagataaaaagtaacataaaatacatttacaattcatgagaatcagaaaaaaaacagattatatataaatatacagacacagccattgtttttccaactgatattaaacaaacatggcaaatattcctgtgaggatttatgttcttccaattctaattagtccatgtaaaactatcatgtcttaaggaaaatgaatcgaactcgttcaccgccattgatgtggattaacaaagatgtatcgggaattaagttcttagaatttagcattgccatagaaaggaagactatacaattaaaacttttagggttttacatctgttactcctgaaatattttaaccatagtacataaataacataggttatttccatgaatactcaattgtaatttccttttattcttatcatcctttcagtgatgcttactagaagacattgtcttagtagactagcaatttaaaaacataagctaagcatacaaaaaagtaaataaatatggaattaagtggaactcttaatctgagtgtagatccatattttttgcctctccataatgtttaatactggaaaagttttttgagctctggctttgtaatagctcagtaaaaatagaaaacaaaagatgcttttagtccctgtatcatggtatcagagggttaacagattttgaaaaaagtcactagaagttggaaagttggtaattcaagagctgtaaatgtcaaactttatattgtggtcattgcaataatatgaaaatttaattagtattaatttaaaaatctaaaccacacagtgatgctcagtttgatgtgaaagacaaaaacagaaattcctagttttaactataatattctgattagaaaatcttgactgacagaattacattcattcaacatgagtactacttgctcagagagaagtgagcggggataagaaaaggtcactccatgagatcattactcagagtatatcaggaagaatggattttctcttttatgatttttttttgagatgagtgtcttctaaacctatagctgttttcaagaagtctttaaggatagccacagggtgattcattaataatacatactattctatttgtaactgttttcttactttctactccctgaggtccaaagcacaggaattgtcttatacctggtgaattttctaaagctatttggaaaaactccattacaaaagatactagtattgtatattagcattgaacaggagaagaaaagatcttctcattgagtacagtatatatatatatatatatatatacactgtatatatatatactgtgtatatatatatatacagtatatatatatactgtatatatatatacagtatatatatatactgtatatatatatatatacactgtgtatatatatatacagtgtatatatatatatacacagtgtatatatatatatatatatatatatagtgtgtatatatatatatatataattggaatatatgtatcattggaaatctccaaatagaggtgtcttcatcattttccttttgttaaaataacactttcacattttattttgtattttataatctgagttgttatttgtaaaacaaaccggtgaagtattatgtaggtcattcattctaccaacattaaattcaagcattcaaagaataaaaataattttcttcatcatctctgtttttcaagaaaatgttttatctgagtcagaatagcttagatctcattcttaattcctcacgtcagtgtttacagacagcaacttgctgtgtttcttctaagcacttcagaaataacaaatctatttcttcatccccctcactatgtcaggtattatcccaattttaaaaattaggtaagacagagaaataactaagtaaataggaaaagcccaagctattttgttaaattttttcaaagttaaatgttactttaacaccatcagataaatattgtaataaacagtaaagacttgactcattagtataaagaaaggagcctggtatcaaatcaaaatctgatcagaacttgcagatagagcactctattgcaggaaaatccctctttctatagggaaaaacaaggtattttagcaaaattaaatatcttcaattcaccaacaaaataatataatccagctacataggacacagcctaaagtttctgattaaatacaagtgatagattcagtacaagtgccagagtttaatcatagaggtatttattatttgttctgtgagctggattcatagccaacttggaggaaagagacagaaaagcaaatgctgtatctgggcattttcctttattaaacaattgatttgtgtgtttttccttttaattctatcagatgcataattatttaggattgttatgtcttgttgatgaatactttatcatttatgaactatcccttttcactagtgatactattgtttactctgaaatctattttgatgttagtgcatccactccagactatacatttttggcttttgttagcattatacatatcatgctataatgggtacatatattcattattttactttaaaactatgtgtgtttttataattacagtgggttttttgttggcagcacacacttggagttttcatcatatccaatctgtcaatctctgacttttaatcaaagtgtttagaccatttacatttaatgtgaatatagatctggtttagtttataactgctatcctgctattcatgttttatgtatttcatctgttgtcccacctttgtatatgtgtatgtgtgtgtgaatttttttctaagtttctgcatttttatttaatatttttaatcattcatcttacactctttctggactcattagctataactgttttgcttcttcagtggttgctttaaaatttatattatatatcttgaccttaccattattgaccttaagtaaatactataccacttaataatacatggttgttattacatttaaagtggggtggtttgaaagagttttattagagtggagaaaataatatgtgagttcgagactggcctgaccaacatggagaaatctcgtttctactaaaaatacaaaattagccagatgtggtgacacatgcctgtaatctcagctactcaggaggctgaggcaggaatcacttgaacccagaggcagaggttgcagtaagccgagatcacgccattgcactccagcatgggcaacaagagtgaaactccacttgagaggaaaaaaaaaaaaaggtatttgataaaatataggagccaattctatttttttaaaaaaactataaaacccaccaacgttatattcaacaagaaaatgctaaagctatttcattaaaacctgagctaagacaaaaatagataaataaacaaatatcctttaaaggttaaaaaaataacgtattgtctaactacacagttagcaattttggtgctcttcagtccttcttgttattttagatatttaactggtgtcattttttttacatcttgaaggacttctttaatgttaaatatttcttgtaacatcattgtgctggtgattaattttccatctttgttatgtgtgaaaaagttttcagtttgctattaaaacttattttcactggtcatagaattctaggttgataaattattttctttctgtatttttaaggatgttccaccattatttcatatattaccttgtttccaacaaaactattgcacttgttctttttttttatttttattatactttaagttctagggtacatgtgcacaacgtgcaggtttgttacatatgtatacatgtgccatgttggtgtgctgcacccattaacttgtcatttacattacgtatctctcctaatgctatccctcccccgacctcacgacaggccccggtgtgtgatgttccccttcctgtgtccaagtgttctcgttgttcaattcccacctatgagtgagaacatgcggtgtttggttttctgtccttgcgatagtttgctgagaatgatggtttccagtttcatccatgtccctacaaaggacatgaactcatccttttttatggctgcatagtatcccatggtgtatatgtgccacattttcttaatccattctatcattgatggacatttgggttggttccaagtctttgctattgtgaatagtgccataataaacatacgtgtgcatgtgtctttatagcagcatgctttataatcctttgggtatatacccagtaatgggatggctgagtcaaatggtatttctagttctagatccctgaggaatcgccacactgtcttccacaatggttgaactcatttacagtcccaccaacagtgtaaaagtgttcctatttctccacatcctctccagcatctgttgtttcctgactttttaatgctcgccattctaactggtgtgagatggtatctcattgtggttttgatttgcatttctctgatggccagtgatgatgagcatttcttcatgtgtctgttggctgcataaatgtcttcttttgagaagtgtctgttcatatccttcgcccactttttgatgggcttctttgtttttttcttgtaaatttaagttctttgtacattctggatattagcccttttcagatgagtagattgcaaaaattttctcccattctgtaggttgcctgttcactctgatggtagtttcttttgctgtgcagaagctctttagtttaattagattccatttgtcaattttggcttttgttgccaatggggttttctaactaaaacttttggtgttttagacatgaagtccttgcccatgcctatgtcctgaatggtattgcctaggttttcttctaggtttttatggttttaggtctaatatttaagtctttaatccatcttgaattaatttttgtataaggtgtaaggaagggatccggtttcagctttctacatatggctagccagttttcccagcaccatttattaaatagggaatcctttccccatttcttgtttttgtcaggtttgtctaagatcagatggttgtagatgtgtggtattatttctgagggctctgttctgttccattgatctatatctctgttttggtaccagtaccaggctgttttggttactgtaggcttgtagtatagtttgaagtcaggtagcatgatgcttccagctttgttcttttggcttaggattgacttggcaatgcgggctcttttttggttccatatgaaccttaaagtaggtttttccaattctgtgaagaaagtcattggtagcttgatggagatggcattgaatctataaattaccttgggcagtgtgaccattttcatgatattgattcttcctatccatgagcatggaacgttcttccatttgtttgtgtcctcttttattttgctgagcagtggtttgtagttctccttgaagaggtccttcacatcccttgtaagttgtattcctaggtatttcattctctttgaagcaattgtgaatgggagttcactcatgatttggttctctgtctgttattagtgtataagaatgctcgcgatttttgcacgttgattttgtatcctgagactttgctgaagttgcttatcagcttaaggagatttggggctgagacaatggggttttctaactataaaatcatgtcatctgtgaacagggacagtttgacttcctcttttcctaattgaataccctttatttctttctcctgcctggcactcgttcttatttttgtaccactgcctctgcacataatatgatttttatttctcactgctttgaagaattatgtccttgtcatggattttatacaattttatttttatatactggtatagttttcattatgcttcttctgattgggaattgttgagatacttcatcaaatttaggagttttcagttattatttcttcacatagtttttctttctcccaatatcactgttctcaactcagaactgcaattaaacagataccttattttattttattcacttatttatttttttgagacagggtctcactctgtcacccaggctggagtgcggtggtgtgatcatggctcactgcagcctcaaattcctgggctcaagcaattctgctgccttagcttcccaaagtgctaggatttccagtgtgagctatgcacatgctgtaccactcagtctctcctctaccttcttgaatatatagaatacagtcataataacactttcattgttcatgtctacaaattattttatctgtctcatttccaggtctgtttctatttattatgtttttttcttcattatgagttgtattttctggtttttatgtttttattttgttgggtgctagagatgttcgtgtttttaaaatattcttgcattttgttctaacatgcagttatgttactttgaaatacatcaacaccttttaggtttgcttttagtctattagatgttactagagtactggggatagtttgtgccactactgagacaataccacctgagtacccaaatttctatgagttacatggttgtccatctggccggatggagtcctgactcagcaccaaagatgtttaactttgttactattgaatggttttgtcctcagccttgggaagtgtcctcatacacatgcactgataagtactcagatgatgacttaagagggacaaaatatctgtagacctccagagctctcctgagaatttctgttctctgtggtattcttccccatcaaactcttgctgctttaagtcacatcagactttcaactttgtgtcttcaatttagggaaactgctaggctgggctccttctgagttgctcttttctcttttgcagcctggaaactttccatataatcagataaagaaatcaaagtgctcactttatttttcttctcttagaagtcgctgaagtgatcttcttcatatccaaagtctcaaaattactgttttacatattttgtctgtttgctttttaagttgatccaggcaagcgggatacatccactccctattaatccattttgaccagaagttggagttctttaataagtgattaaacaatcattttatgatttcagtatgccaaaacttttagctttttaaaggtaccaaaaatgccaaactgcattatatctatttcctgatttctgccacaaatctcatcaagaatgaatcctaactgtcatattgtatttttagagggtaaatttaacctgagtgcttttagaaataggtcttttatcctgtggagaaatgaacctttataactcccagagtgcattctaagttcagtgaattcaatgtaaattacaatgttaacttcagcatctccccccatcaaaaaatcccttcatgcatggaatacagaagttttaagtttatgaaatgcaaacatttaaaattggaaaaatcaatgcactttagccgactcaagaatagctgacatacatgaataaaaaatgaataagtaccatgtagagaacatttattattttgaaacaaagtgcatcataagtattggttaacaaaattctgctttgtattttttgaagcagtttaagaagaattatgtagaatgatgtttgacctaaaatttagaaagcctgatcacaaagacctcactgaaagaagtcatttaatggtaaatgaaattagaaaggagggtagatttattccctgctttttcccaaagtatcttactgagagcatttatgtacagtgcagcaatagtgaacacggacttcagctgcatttcagactgcgggatcagaatagttcattgaaaattcatattgtgtgctgtataagccattctagaaggaaattcatttaccttgatattattttataatttcacgattcacacagagaatccctgcttattcttaagctaataacagtaatttctgagaatataattttattcctagagttttaatgtgtgggctctaaaatggagttttatctcaaatttgattgtaaatgcttcttatttatgttgtttattatttctgtgtgccaatagtttgtccaattactatattctaaatgtgagtagaatatggaatctaatgaatccaaagaaaaatatatcttgtttttttagctttcataaatgctttgaaattcagtttagtgtgtttcggtgcttttattttataaatgtagatgaattcagtataatataatgcattattatctgagttacagttttcttttcaaatgttcttgatcatttagttgacattaatcaaaacactaaatgagtaaattttccatatggcaggcagttgtttacttacaaaaaaaatttcttgtaatagatagtaggcttaaagaccaaatgatttattatttcttaccaaaattattttataaaatggcttattgagtcactttaagcataagaaaccatatttaggaacgtggaggatactaagaaatgtaagacatattctctctctcttttttttttttttttttttttttttgcgacagagtctggctctgttgcccaggcatggtctcggctcactgcaacctctgcctcccaggttcaaccgattctcctgcctcagcctcccaagtagctgggattacaggtgcctgccaccacaccaggctaaatttttgtatttttagtaaagatgaggtttcaccatgttggccaggctggtctcaaactcctgacctcgtgatctgcccacctcagcctctcaaagtcatgggactacaggcgtgagccaccacacccagccataagacatattatctaacatattctaggctaccaaagacctatgtaataaatataagattatttcatgaaaagaataagtgtggtcacatagtttctataagaccagtgattgcattagtagtttgaaagtttactttggtatgaggttgttagaagatttttcctagaaatgttgggtggagaattttgacttaaagataaagtaagattcatcctcatgggacgatatgttatgtactgtgtataagactgcagagtcaaggaaaagcaaaagaggctcaaggttcagtgaacaaactaattgaaccatgaatgcaagttcatataagagagttgcaggagttataaatagagagataacttgagtgcaggttttggaggttcaaaaattgtgacccatgatattcttggatttttctcttaccaaattattccaagagtccatgctgtatatttaacagccattttgctgcagtactgaatcacaaatactggggacttgcgtgcaagtcattaattaagctagttagacttacctgtcacctaccctttattatctttcttatgcttttttgtttgttttagccttctcttctcatttttcacatatctatttttatgagaaaaaaatattctccactgttaaaactcctggtaaaacaagaatccagagttaaaagagaagctgcagctacattgtagttgtatttgaatagactaagcctttctaagatgcagtttattaataggagatattagttactcattattttctgaaaaaatgtgaataattattgttaaatgcctcttcccctcttcacaatgtctgctctaaagaatgagccatgaaaaggaaagatgattaatctgttattatttaattaatcctagttagccctaggaagttctgccctacctcttggtctctttctttaaatccagaattcctcaaggagaagccccttctagttttataatgacatccagagcctaatttctgatgctcttactttggagaaccctgactcagtacccatttcagtgacccctgacttatccatcttcgaggcttgtatcccatcttcttctgcataatatcatttcctgtatctgtgtggctcagaatgatatgaatcctgttcccttcttaggactagtcatgtccaggcatttaaattgttttgagggtgctgggagaagagcaagatttgggccagatagttaagatttatatataattaatatttatatagttcataatttaaagaaattaacctttaaaagtggcaaatcactttataagatagtttctgtaagaattttttgtttattaggtattgtgtgtttgtgtgttttaatcagtactttgttagacaaatgtggaaaataagatactgtatatcttatatatactagtcatgtgactggtacagatatatttggcaagttaaagacagcaatagaatagagttgattacttctagcaatgtctattctgaaacattatcagttaatcagatagattattcatatgtgagttatttacatattttatttagttagcataatcatttgagagaggtgagtgggtatatacagcccaattcttagaaaagtcttttaatcatacttagaaatattatatgttgtctcaaattttgttcattcaataggaatgacatttccctaaactaggcatttactgtctcattgaaatgagaaaaaaaagtggccatacagttcataaatagcatgctataaatcatttaaaaaatagaagcttgtatgtctaaagctccattgtaaattaacttgtataaatgagaagtgcaaacagaactacaataaagcaggcctttacacccttacacgtcattatgtcatttgtcatgtctttcattaggacaggttaaatctttgtgccgatagcatagaatattactgaaaagtcatagtgttatgacataagggatcattttcttctacaagcatttaggggaaagtcaacatagcctccttcataattagcagagaagtgacattttagaaattttttatttctgagatgcttctttaaaaggtgtactggtttgaaggggagcctctaagacggtatgtgcatgttctaacctccagaacctgtgactgtgaccttagatggaaaaggggtcttagcagatgtcaataagttaaggaagtctagatgagatcatccttattaatcaggtgggccctaaatcccatgatgtgtccatataagaggcacatggtggagagatacaagaggagaaggtcatgtgaacacagacacagagatgggaatgatacagtgacaaggaattaggatccagaaaaggcaaaaaaggatcctctcataggccttcagggaccgtgcggccctgctgacacctcagttttggacgtttggacttcagaactgtgaagaaacgatttttgttgtttaagtttgtgtatttgttatggcagctctagaaaatcaatacaaaaccgtagttgttggactttcccccccaatctcctaaacattgttttttaatttctgaaccagcatttcctacttaataaagcagcataactaacaaatatatttttaatgaaaacttgagaaataatttaacacaacactattggagaaagaaagcattagagtgacagggaatgatcacattagaagactctaggcagtgaagttggatgaataagatggttttacctttttagtcaaagggaatattacctcagctatccgaaagaactgtgtcagtcaattcttggccagtcaaacacatctcttatgttagtgtacagcagatacaaattagaaacaataccaatttcaaattcatcctatctaccttttttgtaatgtggcaaggtttttgctttccagaaagaagcagaaaataaatgtgaatggaatacagtgaatactgcataattttttcttgttaagagaaaagcatatttacagcaaagaaattatgtattttttttaaatgtagagcctggaattttaaacacaagagtaaaagtagatgatttttctttatgataatctagttcgcaaggcttgcacaacaatcatttctgagcagacattagggaattctataaaagtattggacaaaacagtacttatggaaagcttgaagaaatggggcagaaaggtgattattttcttttatatttggccctcttcttatcattatctttttctaatatgttacttcatgatggtaatgatacaataataattaaattctcaactgttactttctattttctcaagtctcttacattattgccataccatcttttattatttgaacttgcagtaaaactttggggacgattattttgatcacaactgtaggacttgtgcctctgttgaatcacatacagaaatcaaaagcatggataaatattttgtcaaataaaatttatttaaagaatatttggtaatgagtgacaaatgtttgcaactctgggtaataatagagttatgtgtccattttttcttttggtacattttttacttatctgaatgggagccggaagtgctttaaagtttcagaatgcaagtgcatgcattgcagtgatttttctgttgttggtcaagttacttaaacgctgtgtcctgctttcctccatctgtcgaaggaacataatggccactcatggccttcacaagaaaaagtgtaggaagagaaaacagatcttgtcagtgtggggtggaggatgaagttatttttaaagcaagtatcttgtaccttcaggaagcaaaatctggcttaaggtatttttttttcttcttttctgaataggctatcatcatcaacattttaaactgctttttaatgtgaagactatacttttgttttctgtgagttatattttattattagacattgaggagaaaacaagaagggacccttccaccgccttacaaatagtgttcactaaaagaagtagatattattacttacgctgctgtattatctacacctaggaaacacacttaatacatgcattatgaacaatggaaggcttgcatggcccataataatggtaatgaataacacttattgaacatttactctgtgccaactctatgtattgtctatgctctgtctcctttgctcctcacaatgtacctaaaaggagggtgttctgattgacgccatcttacaatgcattaacaccaattacttcaagttaaactgaggcttagaaggtttaagggacttgtaccaaatcccttagctagttaagtgatagaaccaggactcaaacagcctgactcaaaagcattccttacccactgcgctgtgttacattaggtgacgtacctttcacatgctctctcttgaaaggcaaatacagctttgaaaaatatctagcaagtggagccaattctgctgaaattctatagcaattttctcctgtctgtcatttcttcactggcatttagcatctgaaaaattcttcagagattttcttttctctaaaattacagaagtttaaaattaaagcaagcacaatattaactagtttccaaaaatgaaagttctaaccagctttttgaaagtttgtgataaaagataatatattcttacagtcatactcagaagaataaaggtatgcaagggacagagtggtcagtgaatgtgctcgtgtgggagctgcgttcttttataactctccattctctcccgtggccctctctcttcctcaccggcatagacatttacacacacatatggtcgctttgaacttctcccacaggcttctttgtccactgccatttctatatgttttcttcccagataaattccctacctcagctctccagagtctcccatagtattgacagaatgtgtacgatttgttttaggtttttcaaatatattgaattgagtagtagtgacttgtaccacaacttttaagtagaatgatttagtctctctgaaaacaagttgcctcctttccaagtatgagtcttcagtgttttgcctggcttcactgagagtcagtgagcagactaaggtttgaatattactatccatgagatacataccagaggtgcaaaaatcataataaatgttcaagatcattaacgttataataacaacaaaatagatttacttggataagtctgttaagttaattagagttattggagcattaatgtgtttggagtttaatgccataaatcagcaattcaatcaatatgtatcaagtgccaaagaggaaatcactattgccaattatggttgaatagaaagagccgtacacttggaataaaaattgtaacctagtatctggtccttctttttattatctgggagatcattgacacataatagactctctccagtcctcaatttccacaccgtcaaattagggatggaaataagatttcttgaggttgttacaaagattaaataggtaaagtatataaaagaacttaatatttctatttttttttcttttttcataattagcaggaaattgcccctgtttttttcagggaaacatagctgcaaagtcaactgggaaatgtagtctaattctaccataacattggcccagcaaatttttatggattttctcatgagaaagaaatgaagtatgatcagagagagaacactgtgagtttctggcactatattcaccatagtacaaaatgcaaaatgactcacagaattcaaaaattacaaccttcatcgaccattaagtggaaacttaatgaaaataaaaataaatgggtaaatggggatggtgactcgggggaaaaataattttatatctgttccaattgactcctaccttctctttttcatacatgtataaatgaagtcataacatctctattttccagattcttatttatcccctggctttccacatacattatttcataaacttgaaatttatgaacattagacatcatcttggggcttgtaaaggtgtcctaaccatcccacaaatgtacatgtgcacatgtgcacacatgcacacatacatacacagatacgtaacatggaaagcaaaatggctttctatagatccttaccacgatgttttccacattgatggaaattttttcctatgttaaatattcagcaaactatctctgaattctatctttaaggatttgaaaaaagcagcaaactgcgcccattaacttgtcatttacattaggtatatctcctaatactatccctcccccctcctcccaccccacaacaggccctggtgtgcgatgtcccccttcctgtgtctaagtgttttcattgttcaattcccacctatgagtgagaacgtgagatgtttggttttttgtccttgcaatagtttactgagaatgatggtttccagcctcatccatgtccctacgaaggacatgaactattcttttttatggctgcatagtattccatggtgcatatgtgccacattttcttaatccagtctatcattgtcggacatttgggttggttccaagtctttgctattgtgcacaggtaccctagaacttaaagtacagtaatatatatatatataaaagaaaagtaaaagcattttatgatttcatcccactgaaaaaaaaaaaaaagaaaaaagcagcaaactttttattttctgagtgagcataaatacttaaacccatagatgggagcccagttagttcattaccaaatttaatggttttgaagatatctgtccaaaaattgttatagctgttgggtaaaggaagagacgaggaatgtgtgagtgtctagcattgagcactgttaaaacatccattaatcacatgttaatcctccaatttctagtcataagcaaaaatgcagcacactagaaatgagccttcttattagaattattaatttgagaatcagtcaactacatacttctgtgacatcaaaaaggctgagagaacagtgggtgattgctcaggaaatttatgagaccaacatgaatatctttcacattccacaaaagaaatacaacaaatcctttgctgacaaagctctagtcattacagattttatgttctcgtttacagaggaagagcttctcaagccggtggtttgttttatcacaggaatgttcttgcaggagattcacttacaacaaaaacttcaagtagatttgggttgaatccttattctaccagctataagctgtttgctctttgacaaaaatacttaattgtttttttttttgagacagggtttcactcttactgcccaggctggagtgcagtggcgcgatcttggctcactgcaatctccgcctcctgggttcaagtgattctcctgcctcaacctcctgagtagctgggattggaggcactcgccaccatgaccagctaatttttgtgtttttagtagagacggggtttcaccaggttggtctagaacccctgacctcaggtgatctgcccgactcagcctcccaaagtggtgggattacaggtgtgagccaccacacccagcccttaatatgttaatatcatttttttacctttaaatttcatcgtttagctagtcattttttcattcagtgaataaatcattttaagttcttactatatgccagaaagaatggtaggcactaagaatattataaaataaaataaagaaatggcccatgacttcattgtgaataaggacactcatttctccctggtgggatgttcattaaaggagatagcatgtctaaacagttttcaggttctgaaacatcctggaaattatctcctcttctggaagaaattttccatggattgtctcttttgatttcctccaaaagcaattactttaataatagactcgcctatctgagttttaacaagacacgtaaccacccagctaaaaatgggtttcatggccttctttatggttgtgcatggttgtatgactgagttctggccagtgaaggtgagcaaaggtgccaatgccatcctccggccttgcccactcacagaatgcagtagaacgtgtgagcactcagggtccttccctgttattgcaagctgggagatgacaaggacttacacccagagatggaagccacaggggataacagtgtcacatgaccaacactggaatgctcatttctgttttatttaagctgctgcattttggtgtttctttattgtcacagctttgtctgtaccctaactaataaaatatgtttttgacacagtttatgccattatttattgtattgcacacaagaatggacaagtatgtgaagattcatcattgaaaaatatgttttaactcatttttgaaattattacaatattgttcaaatatatttctctaattatgtatcttccccacttaattatttttattttgagccacattatcttataataattacaatgtaagatgaacagcttatgcttcaaagaaaaaaatgagtatagccctctcatttcaagagacgttcaataaaataaaattcttgaaaaacaacaaaacaataagagtgctctccttaggatttgagttctttaatatatttttacaatatttttgaaatttccttagtcttaagagcacccaggaagttttgaaatataacaaagtatagaagtggtatttacataagtcctacatagatatcatttttttccatttttaattatggtataattcacatgacataaaatttattttcttaatcattttaaagtatacaactcaatgtcattaaacacacttgtaatgttgcgcagccatcgaaccgtacatctctagaactcttttaatcttgtaaagctgaaattctatacccattaaatgacacctgcccattctcctccctccctgtccctggcagccaccacactaatttccatctctatgattttgactactctatacatcacatattagtgaaatgatataatatttacctttttgcaactggcttatttcacttagcataagggcctgaagattaatccgtgttaaagcatgcaacaatgccctcagaatttccttctttttaaaggctgaataatatttcattgtatattgtacctcatacctgcttttaaggtttgagagtgtaatactcagaaatggaattgctagatcatatggtaattctatttttaattgcttgaggctctaccatactgtttttcatagcagttgtactattttacattcccacaagcagtgcacaagggttcctatttctctacaaccctgccaacacttgttgttttgtttttagtgttcctcttttcaatagcagccatcctgataagtatgaggtggtagctcattgtagttttgattttcacttttctaataattagggatgttgaactcttttcttgtacttattggccattgtatatcctctttggagaagtgtctattcatgtcctttttctgcttttgaattaggctgtttgtatttgatgttgagtttaggagttcactatgtattgtgcatattaatattttatcagctatataacttacaaaccctttattctatagtatgggttatctttttactttgttggtactttattttgatgtacaatgtttttaaattttatgaagtcagaggcaaattgcctatttttccttttgttacttacctcttctgttggtgtcatatccaagaaaacattgccaaatctaacatcgtgaatttttgcctgatgttttcttctaagagttttatagtgttacatctgacatttaaatcttttaccattttgggtcgattttttgtagtggtattaaaaagggtccaacttcaaccatttgcatgtgaatatccaggtttcccagcaccatttgttgaaaagactgtcctttctccattaaatcgtcttgaaatcttgtcaacattatttgactgtatatcgcaagggtttatttctgggttccctattctattctgttgatttatatcactgtatatatgctagtaccacactattttgattactgtagccttatagtaagttttgaaatcaaaaagtatgcgtcttcccctttattctcctttttcaaaattgttttggctatttggactcctttaagattacatatgagttttagatgagttttctgttctaaaaaaaatcactagaatttttaatagagattgcattgaatctgtaaaacacattgggttgtactgacttcttaacaatgttatagttcttctagtacgtgaacacgggctgcgtttctatatatttaaagtctttaatttcttttgcagtgcttaattgtttttactatagaagtcttttatctccttggctcagttaattttgaaggattttattttttgtactattataaattgaatgctttttgtaatttctttttcagattgttcattgttattttatggaaacacaactgattttttgtgttattttgctaaattcgtgtatttgctctaaaaggtgttttggtttttttgtacgtgtttctgtagaatctttacacttgattttagctaaaaactgaaaagttatatttacaaaatcttagggttttatatgcataagactttatcatctgcaaacaataaaattttacttcttttttttccagttcagaatccttctatttctttttcttgcctaattgctctgactaaaactttcaagtactattagagtagaagtgttgaaagtgggcatccttgtctttttcctgatcttagaggaaaagtctcaccattgggcattgtgtttgctgtggctttttcatatatgacttttattatgttgagataatttcctttgattcctagtttgttgagtatttctactgaaagggtgttgaattttgtcaaatgctttttctgcatcaattgatgacgtggtggtttttcttcactttattagtctggtggattacattgattaatttttgtacgtcaaatcatttttaccttccaggaataaatctcacttggccttaatataatatatgctgctgaatttggtttgctagtattttattgtggattttggcataaatatttataggagatattggtctgtagctctctttttttatagtgtctatgtctgactttggtaataggaaaatgctggcctcatagaatgagttaggaagtgttccctcctcttcagttttttgaaagattttaaaaagaactggtactaatttttttaatgtttggtagaattcacctacaaacccatgaggtcctggacttttacttgttggggaatttttgattagtgatcaaatctcctaaatagttgcagttctattcagattttctattgtgatttagtcttggttggtagtatgtttgtaggaatgtgtccattttatctttgttatccgatttgttgatgtacagttgtttctagtactctgttgtaatccttcttatttctttaaatcaggaatggtatccccattttaatttctcacttcagtaatttgagtcttctatttttcttagttcatcaagccaaaggtttgccaatttggtttatcttttcaaagaactagctttgggtttcattgacattctccattttcctattctctatttatctctgctctagtctttgttatttccttccttctagctttggatttagtttattattttttaatttaagcatttacagctgtaaactttaccccagcactacttctgctgcaactcatgtgttttggtacactgtctttttattttcacttggttccatgtattttctaatttcctttgttgtttaagagtgtattgtgttatttaatttccatacatttgtgattttccagttttacttctgttattgatttataacttcatcccattacggccagagaagatactttatatgatctttatctctcactatgcattgaaacttacttaataggatatggcctatcctggaaaatgggaagaatgtgtatgctgttgttgttagagtgttctacatatgcctgttaaatctagttggtttgttttgttaagtcctctattttcttatttatcttatgattcatgcttaaccaacaaaaaaaaattttaccgaaacaagtgatgttctctcgtctaagatattttcttagaatactaaacacttctaccagtgatactgctgttaacaatattttttggaaattattgttggcaaagtcttttagaaattatagcatgaccttttgaatttctttattgatagaaatattttatcagtggatttggtttaatacaaccaacagtgattcaaggccaaatcttataagatgagcaacaagttataaagtaacatttcagggtattttttaaagaaaagtctaaaaatgacaagatcatctgtctatttgcagcttattttaaactgtgtttctcccttaaattatatactcaaaatagttgggagtaaacagcagagacatctcttacctaaagttattctagggctagttcatcttgtcagaagtataatcccagtccacagttttcaaagaagtgggactggtgagtgtcagaaaaatattatcactagtcaaaagcatgattgcatttcctcttgtaatctgcaaagtgtcagaggaacagttattctcagtgttattgcataggcatggaagtggtaaagaaaaaatgtttttggtcacagctaccctaggatgatggttcttgcaggtttttaaaagacagaataggcatcagagataaattagggccctaaaataaaaagaaaatgaacaaaactttaattaaatttataatgaattgttatgagaagtgtcagccagtacagatcataataataaaacaaataccttctattgaatgttaacccaatatctagttgttttaaaatattatatcaactattttataattataatgtccagaatttacaagaaaaaaagcccattaaaaagtgggcaaataatacgaacaacgcttttcaaagaagacatacatgcagccaactagcatatgaaacaatcctaagcatcactaatcattagaaatatgcaaatcaaaaccacaatgagatactgtcacacaccagtcagaatggccatcattaagaagtcaaaaaatagcagatgctgatgaggttgtggagagaaagaaacagttatacactgttagtgaaagtgtaaattagttcagttattgtggaaagcaatgtgacagttcctcaaaggacttaaaagagaattaccatttgactgagcaatcctattactggaaatatacacaaagaaatataaattgttctaccataaagacacatgtgtgtgtatgttcattgttgtacttactattcaaataagcaaagacatagaatcaacctaaatgcccatccatggtagactggataaagaaaatgtggtacatatacatcgtggaatactatgcagccataaaaaagaatgatatggcctttgcagcatggatggaactggaagccattatcctaagccactaacaggaatagaaaaccaaatactacatgttctcacttataagtgtttgctaaacagtaagaacatatgaacacaaagagggcaacagcagacactgaggcctacttgagggtaaagggtagggggagggagaagattagaaaaaatacccattgagtactatgcttattacctggtaataataatctgtacaccaaacccccgtgaatgctgtttacctatataacaaacttgcacacgtacccatgaacctaaaagttaaaaaaaatcaactatatatgtattaaataaaagtgatataatttacatttgcaaattacagaagataagcatatatgaaacctagagaagttaaaaaatttttcaagaatagtagttgaaaattcacttctaatgctggtgtgtctaatcccaattccacggccttcccactctcttgtgcctccttagggagaaatctgtcctgaaataattctgtacttctgggccttgatcctcagaactctgtaatacccactgaaagtcagagaccatgtgatttcattagagtcataaccccttctaggtttgtagccccttttaagtttgcatctctgtatttttctctggcttcatatcttcttcccacttctcactaaacaaaaggctaaagaaagctgagcctaaccacatgtttgcctctccacaaatgaataagttgctattcatcattttcttttgtttgctttcctttatcagaattttccaaacatgcagctgtattaaaaactaggtcaatttaaagcaatcatgcacaaaattgtttattaaaatacaaatatacaccagtaatgttataattgaatgtatttttctgggacccataagtcttttgtgcctttgatttctctggtttcctcatgtggatagtaatttttaccaagaattttactatgaatagatctagtgaatattcctgcggatgctgacatttggtagcttcttgactcatttatgttaagtccatttaattttttctgtttttatcccctctctctcctctactcccccgaaataatccaagtgagcaactaaaatgctacttgattttcttgagaactttggccagaagctatatttatttataatcacatgtcctaatgctatattgtttgtacgactcattattgtagttattattctttaccagttgtttatttttacataattattctaacttcatttcatcatgttttattaaagcacaaggttaaaaatgagttcagttttactgtcatcttagaattatcattaacttaatgtccctttttgttagttacaatttttccacctactcaggtgttcatgagttgagtatatactcaaatgcacaacaaacccaaattttagagcacagaattgaaaatcatgagtttttgaaagtttcatgaactgaggcaatcttattgccattgccatgaggagagaaattgattaggtcatatagaaggaattgaatgagataaggcaaatgctttatttttgttatcttcaagtgtgatatatgtatgcaaactattaaactcctacccatgctataaagtcatagtatgtgtatgtactgacttactttacatttgaatataaaacagataaatagtaacaggaatcctttacactgaatctgcttcatctgcccttggcattgtccacaggctgtagcaactacagcaatgccatgggaggcaaaggtaaacagagcttttatgtaggtgtgctgtccagtgtggaagctgctgtccatatatggctatttaaatttgaatgaattaaataaaatgaaaaaaaaatagatccacatttcttctactcacattgtaagtactcaacagccacatgtggccagtgactaccacattggacagcaataatacagaaaacttcatcatcacagaaggtaccatggggcaatgctgttttatagtatttagtagattgccttaattgggacttagcctctgaataatgaaaaaagcagaagcaacagtgcacaaatagatgacatccaagattttaaataaatacacacatatatgcatgaaactatgtattatttgtgtgagcatcatctaactggcatgctgggtgattaggttagcatttaggtaacaaaagatgtcacccattgaagacaagatcctgagcaggctagttcaatgcacacattcatacacacacgtacacactcacatacacacaaagtcttaatgcttgttgagtgaaaaggcaaaataaaaatataaaagatagtcaaccatgacatatgctaacatactatgatgttaggagaaaattaaatggtattcatacacgtacccacacacatacacacagtctcagacacttgttgagtgaaatggcaaaataaaagtataaaagatagtcaccatgacatatattaacatactgtgatgttaggagaaaattaaatgttggttaatatttattactaaagagttaaaaatgcaatctgcactcttcttaaagtgaggtatggtaaagcctccagattatttctgtcttgtcattatttccacctttgcatttcaaagagagtgtaaaccatttgggcctacttgctgtcttactcagtgtttatcctgcagtgacccatgggtggattggaaagtaggacagacctggcttggaatctgagcactgctacttaatgagctctgttttctcatctcctgaatggggacaatcactgtgcctaccttttagggttcctacgaagataagtgcatcagagcacttcaggattgacatctggtgcaggaagtgctcataaacagggactcaggttcatatactaacctctgatcttccttcctagcctctctgtatctttatctttatagttctttctgttcatgtcttctgttttaatgctctgctatgtctttgatcccttgccctcactcagaaacccaaaggaatgaatatggagattaagaaagagaaggctaccagaaagtaaagtaaaaggagaaaggaaatgggaagaggaaggaattacaaacatctataaaaagatatgcttcctctttttgttcctgactaaaactcattttgttttattttgttctctttatgctaaagagtcagtttgactgactttttaaaataatgatttgtttgcttgaattaactaaatgaacaatatttatatttcttaataattgagtccttaggtgatcatacaatgttaccaccttatatttaattcctttttttttttttttttttgagaaatgtgaacaaaaagaggaaaacctgtgtgtttggttataaggtctctggttaattttctgatgtaaagctttactgaaaaatcatttcattaagtgctccacttgtgagctgcttgtagtgctttgtaatctaagcatttcttcagtcatttctctgactctgagggctctctgccaaagcacggcttaccaactggagcaggtaaggaatgtttattttgctgtaattggtgaccaaaggctgctctgcataatggctcagaggaaaactcagaccttctattcctgacactatggaggagaaaacctgaacttaaaaaggcactcgggtcttacctatatcttttttgatgaggtgattgcaactggacctcagccttgccatttctaaaatagggatgatcattcctactctatctattttctaacgttgttgagataattgatacaaatattattttaaaaatcaagccagacgcggtgacgtgtggctgtaatcccagcactctgagaggctgaggcaggcggatcacttgaggtcaggagttcgagaacaacctggccaacatggtgaaacactgtctctactgaaaatcagccgggcgtgttggtgggtgcctgtactcccagctactcgggagactgaggcaggaaaattgcttgaacctaggaggcggaggttgcagtgagccaagatagcgccactgaactctagccccggcgagtgagcaaaactgtgtctcaaaaataaataaataaatatttaaaaataaacaaacaaaaagcaaagcacagtatgcatgagtttgctttttctaaatgtgatgatgaaagctatcatataaatttggtagtactcaccaacgtagagccaacaattctaagcagcttatctccagtctgagtctaaagaaccctaagacatctagttaattcagtggtaacaatagggaagcaattatttggaagagtgtctggagtacacgtgctgctttcctgagctccaaagaaagaggccaccataccacaggtttttttacacaattcttacaccatgaccggagcccaaggcagacagtcatctttagctatgctgccctttcttccctatatcaaatatgacagcagaaatatcttttctcccctcttgacttcctaatactagcaataactttatctcattatcaaactcaaaatttaagagtcactcttgatttttccctttcttcattgagtaacaaattatgttactcacgtccattgtttgctcttaatttatactttaccacctcagttcaggcccctatggtctttgcccagacaattgcaatagcttctgtagtattcctactttcaatatcttttccactttccctggactgcctagttctgaggaatcaatttccctaaaagtgcagtttgaaacttgttgaaaatcttcttcaactcacatctcttattctataaaaggtagataacacagaggatacaaggctgagctttaagaattagacatgataccactgtcttagtctattttgtgatgttataacagaatatctgagactgggtaatttacaaagaaaaggaatttatttctcacaattctagaggctgagaagtccaaggacaaggagctgctgcatctggtgagggacttcttgctacattatcccatggtggaaggcagaaggacaagaaaagatgcatttgagagagagagagagagagagagagagagagagagagagagagagaggaagaaggccaaactcatccttttcaacaggaacccactcctgcaataactactccactcatacaatagcagcattaatccattcatgaggccagagcccttgtgaccaatcacctcttacatgtcccacctcacaacactcttgcactggtgattaaatttccaacgcatgaaccttgagggacacattcaaacaaaccatagcaatcacctacctataaaaagaggacactcatctattcaataaatatttatggagtccttactgtatgtcacactggattaaggtgagaaataaatgaagtaagggatgggaggtagttaaaaggcctaattaggcatccaacaaatgttactattaggaaaaagagaatgaggaggagttgctgttattattgtcttcaagtttgattctaatatgcatgacgcatccacaatgaactgtgcccttgcatttgcttgtttcactcttttccctcagccattgttcatcaaaagattcagcaaaactgccaccttcacagagaatgctctctgattccagaaggctttgctctggtttatttatttattttaattaattaatttatttttttaagacggggtctggctctgttgctggagtgcagtggcgcaatctcagctcactgcaacctctgcgtcctgggttcaagtgattcttgtgcctcagccttcacagtagctgggattacaggcacgtgcctccttacccagctaatttttctatttttattagaaacagggttttgcctgttggtcgggctggtctcgaactcctggcctcaggttatccacctgcctcagcctcccaaagtgctggaattacaggtgtgagcccgaccctgattttcttttaaaactccaacacaatttttttattaaaaggttcattagggaaaataatggtttttgtttttgttttttaatctttatgtactctagagagcttataaaatacataatatatcttacagaagatgttcaatggcgattgttgagtgtccctttgaatgaacaaatggaaggatgaagattgaatgtgaatatgcaagtgagagaggaaaatattataaaatatctttggattcattttttcacacacctactggtatcagtatgtgcagtttaggatcaggaaatctgagttccatgatcaaattgattagggacttgctattcaaccttcagtaaataatttagcctttctgtgtctcatacattcagcaattcaacaaatatttgttaagcaccttctatctgcccagcactgaaacatttctcactaagcatgttttgacctgattttcttcccggtaatacactttagtagaagattgaaaatgtaccctaatttttcttccttggagtcaaatactttctcacactgagtaggtgagtagctggtatctgcaagactgataaatgagaaaacatgtcataaactgaccattctttggacagtatttctagaaaagaaaaaaagaaaaatctttatcaggatgccattagattagctattaattacgtttataaaggagtatatgtaatgaagtagaattgaatgcattatacaaatggcatctttctcaaatatgtgttgctcatccttttaagagaccaatgcaatcatccatattgtctctccacccactacatttaattaaacagtttgggtccagtggggtcaaaggtgttcagtaacatttaccgtctgacagcaatcccatggcctatattctgtgaatgtggaagccctggttcattgcaatgagcaggtatctgcgttagcaaagcagctaccactctaattttctctaattgacttgttggcagtgctaacagagagggcaaaagatgcaggaacatgcagagtgggccccgacaagaacttggcatggatgaggccagtgagtgaagtatataatctgtaatgaataaaggactctgggctgtcaatctggcacatgccactggcatttaattcacacaaaatattaattaaaaataatgatgttctccccagcttttgtcgccaagtacagcatcttggtctagccctgaagagctgtctacaggtttcttgattcattccctcagccccagagaaagacattcatctcttaccttcagggaagcctcaaaaaaagcttttagaataatgggtctctcacctaccaagtctcaggggaaggagaacccaggcttttcctgattacccatttcttgtctttttcaatctctgtgatcaacgaatgtgcatttattttctcctttcctggccacagagaatatactggccaagagccatctattttggatgctcaacgagttaataaatatttcttcagtttcctttatcccaaactgaggtgttctacaagaaaggttggccaaacaataatgaaaatctgatcaataatttcaaatctgctaaataacccagaatattcttgatttaaaagaattcccgtggacttccaaattattatttggaaatttattttcaaattatttcagtatgattaaatcacagtaaattcaaagaagaaaatactgctgagctttattttgcagaggcaactgataaatttttaagcctatatatttgcaacattttagcaagtacaaaaaaatacacttactgtcatgattgtcactaagtgtattcctgcacaatggggtctggccataattaatgattaattcatttggaatcatcatgataatattaaatgtgtttaactcatttgatgcttctgtagagggagcaattctaggcaattcttttgtgatttactggttttaaagtttaagagctctgagcatgtgcaggaaaatagttccacattgctctccagtggcacagtggtaaattacacccttcttacatactggtagaaaaccctcattctctcttgctcccaattcacacttaaagcatctttcctcttccatatacattcaaacaaaatacctccatcacaatataaaaggatatcaaagcactatagcccacttgttaactaataaatgtacaatattttattgttttttgttctggaagatcaattattggatcaaactttatcaggaccggaacaaaatcctattgtttcctcagtaggtccagaatgcagtttggcaagagcacaatacagaggctagactccccaaaagatgtttatgagcagttaaagtgtgaaaagcataaaagaaagctcctggaaaaggcagtcaaaggggttgtggagtcttcccaagcctttattacttaggtagttctgcattactttagaaaaaccattgaccttacctgagcctcaagttactaactgacaataggaaaacattgagccaaaacatcttcaggactcctagctctatgggatattcttataccagttacaagtccattgcaagtgtgtttactttttacggggctaagctgttaccactttttgtttaagtgtaaggttgatcttctctaagatgtgcacagcatagtaggtattggtgaaatacagtgattagtataattcattaatccaacagagagtaaattataaagctctcgactcagcatattctataccatggctaaagatcaagtgaaagaagctgtcattactcagatgactcgagatttggtaggtatcaatattagcaagagtctgttttggaatgacagttacctcaaatttatgggggttaggagatgaagaaatgatgactgcttcagattaagttaaaaattcaaaccaatacaatgagaatcttgtattctcagtaccaagtaaggtatttttaattttttttcttttttaaaaaagaaataatatacaccctgaaagactgaaaggtaataatccagtaatgttacagaagcttttacagagtgcattttctatggagctataaattaagcatctgggtggtgggaacagaaaaatgaagacatgaatttagtgtctcatggactatgctgaccatccataagctacagctgttaaccctgattaggaagtcaaaggcttcctattaagtagaacattctttgaatcctaatccaaattggacctgtgaatataaaacaatcacttcaaatctcctagcataaacacctgtttcattcttttatatttaccccccaccccccccccaccaccaccttaccacatcatataaagtttctagtttgttgttgctctaaaggttgacggcttgactatggaagaccagacttcagtatctatttttccgggattatatgtatattggcatgtagttgggtatgtaggaatctgtccaaggttatagactaatgaccacaggcttggattcagtccagagagatagtttttccaggataggaaatttattgtatttattgtattttccaggacaggaatttattgtatttatttaaattatctgccaacactgaaaaatttgataatttctcataaaaatctggatttccagataatctgacaaaactgggactaccttccatacactaatattatcttggacctgaatagtggctccactctttagatcaatcatatactttccaagatcctctctgacctagtggctctcatacactgtagccaaatctagccgtttttcttttctctctctctctgattaaaaacaacacacacacacacacacacacacacacacacacacccctacctcctaagcacttgagtgtggaatttctgatcactttttcactcttttgataaacacttagatagatgcaaatacggagatgtattcaaattgcgaatggaatttgaactgcaaaaaggcaattttaaatggctcaagcctaataaaaatgtttacatttttggtgcatagatgattcatatatttgaaatcagacgtagtccatcctgcaataactcaaaagaatatatttcccagtggaaaaaaaagtgtactttttgatctacctaattgtattttcaccattttttcactgaaatgttttcttcctcctatagtgcttcttagtcctacccttattcacaagccctagttcaaagttcatatattccaaaagtcttctttgatgacctaaatcctcactaatttttcagacctctaaatgtatagcattcataagctatatcacatactttattgtttaattttacatagtctttcattgttttctctgcccagaattatattagtaacctgacagaaattcatcttctccaagtacttggatctcaaagcgcatttaacacttgttgattgattactttcttattaggaaaatagcttgacaacatacattttcaaaaaagaaatattcccttttggagggaaagcaattcactgaatagaagccctttgactacattagatataatcttattttattcttcttgctgtattatagctcttgaatccatgtggtttagagtctcaatatctttaacattaatacttaggtcacatacaaattttatgaagaaaactcaatcagatcaatttttatagatgtctatcagagataaatacactcatttttaaggcttttttattttgatataaaacccagatacagaaaaccacatgcaacaaatgtgtaatttaatgaagtattataaattgaagttcaccatgtttccttgctctgttttctgcaatctgtcatttaggtccagaggctagatcagactaagtaggtttgatccctttggcaaaactctggagagtagtctgttctttcatcaggaagcacatactgtctcgttgtctctattttatcttagcaattattaatgcttaatgcttagatccattcattaatgggggctgtaaaacagcaatattttaattttactgttttgtttttatttgttagctagaattatgttctgatttcacaacctcagaaatgaccaactgttattctttaaaatacctttatcaaattatgcatttatgtatatttggtgagtttccatacatcacagcatttatgcttttctgtttgcagattatccttatctctggtctgagggagtctcttcaaattgactactgaacccatttgacatgattttattagttgcttccgttctatctagtatgtcaaaatatttcaggttcatttggcatgttttctactttaagaatcaaccagttctgcgagaagctgcttctttttaataggaattaattttcccccaaactgcagtctgtgtattagggatggttattgctaccgagtccaggtttccagacattttttagcagacagagctggaagagagaaaaagtacaattttgagttcaaacttatttttccaattcaactttaggaacacagactttatttaaccttttctgtattacatctctaggtcttttcatctacaccaagaatctggttctcagggacagaggggatgatagaatatctcatgtttacccatttgctttattccatattacattagtctcaaaataataaaagtgtcaacatcaataataattattgaagtatttatctttgcatatactgtcattagtctttaattttgttttatgattgtaccatatctataatatcaaaacatttagccattacaaaataaaatatctttcctttaacttagtcttagtttattaaatttttattcaccagttagctattaaatcagtatctcttctggtcatcgtatatgcctaaagctcatttactagtagttctggggatcagggaacaatattcctgagtacttgcaagtggataagtttgtaccctttatgtttaaagttaatttttgttgactataaaactttgaattacattttcttatgttgagtatctaaagttactctaatttcttctgccgtaaaatgttatataaagcctgataatctaatttttttttctaagtcatatattatttttgtctggatgcctaaaacattattttaaatcagcagattttttatttagtgattctgtttttattttcctttggattttcctcatcaaggactcctattatctgtacgttagatcttccttctctaacttcaatatttatcactttctcctgaatcctttttcagtcttcttaatttcttttgttatgtttttgcttttgacttgtattcatctagttaccgttcatgtctaaaattttttaatttacatatatctattccttgagttatgccacctcatttctgagttttctgatttatgttactttttcatatctggcattttcttaatgtagtttagttcattttgaaatcataaattgcagttttgatctatttttcttgggtgttttcttctactttttatccattttctgtacttttctataggaatgatattctcctattttattttttcttgtgctaattttgtaaagaagtttacctcaataatttttttttcttttttttgaggcagagtctcgctgtgtcgcgcaggatggagtgcaatggcgctatctcggctcactgcaagctccgcctcccaggttcacgccattctcctgcctcagcttcccgagtagctgggactcgggcacccgccacagtgcccggctaatttttttcttttttttttttttttgtatttttagtagagacggggtttcaccgtgttagccaggatgctcaatacatttttattgcttacatttatgtaatttgtttttcctgttctttcagaaattcagagagctcttctcaatacatagagctccctgtcctgttcttttcaatagacagggttcagcaaactacaggttacaagtagaatctggagcaggtcttgttcttgtatggacccctgaattataagtggttcttacatttttgaagtgttgtaaacaaataaacagagataaaaattgacagaaacaatgtgacattcaaagctaaagtatttactctccgggcctacgaaagcttgccagctctggatacagactgaaaactatggcagcttgctttctgaattttcatggttcttcttctcccctacttttaactggactttctctccccttcatcaatattgtttcaatcttggttatatcttacatcagttcacaggaggttgtccccagtttgggcccagtgctagagaggagactttgcaggtcagttttgagtgtttaaatttgttgttctggaactgatctgctgtgctttccagcattagctgatacctattttagaattatcctgtttttaggtttgatgcttccctttgatgtttcttacacagatgcagacaacaaacagatgatgaggctgtcggttgtttattcacacccacttgtatattagggttcgagggcacacatcatcacataggtttgcagcaagcagataaatgctttcggttttctacctagtagttcagtatgttttcatatggggattgaggaagatcaaaaaaccctactgctaccacccactgccactttcctttctgaatccaactcactcattcttaaacaatttaccaagtagattatatgaaatttgttttgaggaaaatgtttgccttgagtattttgatacattaaatatatcaacacgttcatattgtttctgttttttctccagagtcaagttcccattatgtaatctccctaaaagcttttaacaatgccggagaaggagttcctctttatgaaagtgccaccaccaggtctataaccggtaagtgaaattgttaatcttcctctgacaaagtatatttgatttatggtgaaaaaagaaaaactaaaataaaatacaaagaaacaaaaatgaatatatcctatcattatcctctgataatcctcagagaataattatcctctgagtctgataagtacatatgtatacttgcacacatatgcatgcatttttttatttctttggttgtcgaaattaagtaggaggaattcagtttataaatttgcacatggacttagagaatatagatctctcaatctgttccttcccaatagcatcatggttttggtgccctgataccatgcttccatctcctgagcagtttgtctcaaatcaatgccatctttgtccctgcataaaggttgccaaatgcctaaatagacacttgcttctccacacagggtctttcaaactaagatgacaaggaagagctggccttctggggtggtttgcattaggctgagtgacatatgtggtatcttcctgagctgggcctccaggtcaccccagcagtgcccagggcctcaggaccttaaagggatagctgatttaaggccttgtcacccttaggaatttttctgttagttggactgtaaaggcagtacataagagtgaaagggctcaagatactgagaaagaaatgggtaagatggtgagatccaaactatttatggaggttatttgttagcatgtgtaggcttagtccaaaatacaataagcaacacatttgtagggctattcagagtccctggaaagtcacttgactacttccccaaacccctgccacagacttatgtctgaaatctccaagtaaaacccaagttccctctctaattaatacattgaatctgccccctcacacccttcggacgtcgtttaacttgtcagatattgtccccttaacgaaaacagaggatctgagatagcaagcatcggagaacgtgagatgttactgatgtttgaaatttggatgagttggaagaaatggttataaaataaatagtggaatcccgtggcttctactcctgcccaaatttatgtgaacttagtgcagtttgtttgccaaatgtacaagcttcattcatagactatcttaagaatacagttgttctttgaattcataattgttatgtcatggcctttagaaaatactgtcactatattgattttagtagtattatttaaggcaaagttgctattgtagtctctttgaatctttgaccattgtttccaggtctacaatctgtctaaagtagaatgcaaaattttgggcagatgtcaatatgtttatttatctgtggagacagtatatatcattcattgtataatcaaaggggttcatgacttctctaaaagagtaaataattaccccagagaatatttactatcaaacgtgttatctccaaatatagaaagatgagaaaacttgaggtttgggttacaaactaagagctaacagatgggtgtctgggattttaactttattcccttgctctgctagcaacaagattctttgtgagcaaacaggccactttggctgcaccattgtgtctcataattttcctttagtgaccatctctgtcctgcctatggtaaaagatccccagtagccgctcattgccatggtgacttggcacttgtgatcaggccatgcaaaatgatactacagtcggtcttttcaagctcttattctcttaccaaagctaatggccccaaggaaggaccactgaggtggcaaataaaaatcgcttttcaatcagaaactggaaaaggtgaaagaattcaaataaactgaaagtaagttgttcagaaagaaccactggagtcattatcagcttcattcttcttagcatttgttgcattaattctagcatatgacattcccaaggtggtttcaaaaacaccagtgatccaggcaatttttattttctgatgactcagatcttaaaggaactgagaattgaaataatactaaaagttggaatttgtgtgaggaattttcttattggagaaaagccagttaaggggttcgagaagaatgcgtgattccagcccttttcaaaaaggaaagaaaacactttttctggaagtggcagaattattttattttgcttccacatgtcatggagaacaaagaacaaataaatgaaatcaaaggttaaggaaactccattaataaaagtgtcagtgccacatagacggcatcctctatctctaagcttctgcaaaggcataccatggacagtctcgaacaagggcccgtgtaaagtaactacaaaatatatcacaggcaataaaacctcaagtcagaataagcatcaggctatagagttttctgcacacatgtgctcacagatgttggtgagctctggagcctcatcccatactgggaatatcagcattagagctgctgaaagtctcacgtggccacatgcattaagagtctcatttttgctgtaaagccctttatttcttgttgtcttaaggacaagatatcttgagcctggagaaggaaagaagatgaaaagaagaagactaataaaacacgctgtttcattgatttattctcaactgctttatcaatgttaaaatgaagtacaatccacatgtaaaattgcatcattatttttaaagttcattttttttgagatagggtctcattctgttgcccaagctggagtgcagtggtgcagtcatggctcactgtagacttgacctcttaggctcaagtgatcctcccacctaagtctcctgggtagctgggactgcaggtgtgccccactatacctggtattttttgtttgtttgtttgagatggagtcttgctatgttgcccaggctggtcttgaactcttagcctcaaacaatccttctgcctcagccttccaaaatgctgggtttacaggtgtgagtcaccacacccatctaaagttcattttgaatgttagtgtaatgactcaacattcatgggcacttacaaaaacacctgttaggaattgaacggatttctttctcagcaaaagtttggaggctatattttgtcttttactaaattttttttcaattctcttgaatgtaaccactcagagtcagcgtataaatcacccagtggtaggaagagaaaagaaaaaagttctgtagcaacaaaagaatgtgttaaattcaattattcaaatattaatagtttctgacctgagagaaaaagacaattaatatatgcaatatgtattaatagctgtgcttgctgtgcacgataacgctctgctttgctggaaatgctctatatctgcatcagacactaggtttttatagcaatttaacacttgaaattgcctagtgctacacaggaagtgaattttttgttattctaatttatttaaacttaactagttcatataactagtggtcattgtactagcacagctctggaggaagtgtcaagaaggatgacaagccacacctgaaaaaatattattccataaaatgggaaagaaaaaacttggccaaggatagaaatttctggactgtgtaagtccatcaagaaataccacccaacacccttgcttgaaatttcagagaagcattctggaactgactccaagaaactcagtaagaatggtcatgaatagtatacccatttaagatcagaaatagcaggattgactatttccatttcttgaagaagaatcaccctatttcaaaacgttatgtatggcacctgtgaaaaaactatacagttaatgtatgtttaccaataaaactggattaagaaaacagtaaaataggtcaaaagaggagtttgtaaattagaaaacgtcccatatgtgtatcacgttcttcttgtaaagccagctaaaactagaaacaagtaaaacaaagtagcacctgctttaatttggcaaaaatgtcttccactgctacacaaaccgatgaatgattggaatccttgtggagactgcaacgtcttctctttccccttcatcgttttataaatctatttgagtttaaaggatcccttaataaaaagagacatcaaataaaatacagaaagcctgggctctgtcattaaattttaaacacaactctctttctctttctctctctctctccttttatttttgtttttgttttcagttttatattttgctccaaagaccacaaactagtaaactactgaataattcattggaaaacagagtgatgaataggggataggcatttgaaatgcagtggacaaagtgaagtaatcatcaaaaccagccagcagtcactccactttaaactaggctgttgaaaaaaataaaccctgtattatgctgctgtagacacccagcatattagtaggtctcatctccccaaatgttatcatatgcccagcctgagagttatattatcacatattatttttcttagaatatgcactacataatataaagattttttaagtgtaaatgtcttaagtacaaaatcaaatgctcaaagttaggctgttactgtggccacaaaatcagcttctcttattctgatatcacagcataaacatgattacaaggtgttttggagaattttgtaaaaacacacacatcattttgcagattcccattatattatggatcaaagcatgtatatacctcagtgcaaatctcataagtctgtaggtagttaatcctgtcttgccatccaataatataaaattgtaggaatgtgtaatatgggaactcctaccaagactaaaaacttagctaattactctgtgagaatgtgggtaaaatcacacttctacattttcaagggtttcagtctaagaaagcctgacaaaccaggtgctgtctgaaacttaattatcaaatatataattgatccatgggatcatgtgtacctggtcactctggttttgtgcaatcacagccacacacaggttgctgtggatgtcagggtactttgttctttattatttatttgtttcttgcccaggaaatgtgtttgcagatataagctaagcaacaatgaaaacagagaaaccctattaagttagagaaggaggagaaaataaacaaaaaattaggtattagataagcaattagctttttgtaggcagaaataaactggaacccccatttttatcttattattttaaattatatagtaataaaactgatcgatcctgtaactagatcttttaagaagcaatgtgcaacatttaaaaaatagtctttaaaatatataagcagaagtgacagtcaaattgataaaaccactctaagagaatgagtaaattatagaaaatattcaattacttttttgcaatatagcaatactgtttctaatgtgttttccgattgaattaattacatttttttctgttcttctcatgttccctttcatcattattgccatgcatttaactcattgtgatgtgttaccactgatatttattttttaacgcttttatttacgtatttatttgtttgtttcatttggtgggtttttaaacccagatcccactgacccagttgattattatcctttgcttgatgatttccccacctcggtcccagatctctccacccccatgctcccaccagtaggtgtacaggctgtggctcttacccatgatgctgtgagggtcagctgggcagacaactctgtccctaagaaccaaaagacgtctgaggtgcgactttacaccgtccggtggagaaccagcttttctgcaagtgcaaaatacaaggtgaagttctaattgatagcatgaaatttaaaatgaactgacatttgtttaacacattgttttaaacctctcctggactgtcatgagtcgttttgctgctgtgtatctatgtagaaaaacaaagcattttaataactcaatatctaagattaacatgagaataattgtattttaggaaacaattctaaggcaaggtaggaaaacatcaagtgctgtaaaacgttatttgcttttcaccagatgctgagtttgtataaatgatttgattctgtgcaagagaatgccattgtccctttaaaatagcagagatctatgttaattttctggattttggtatcttttttttttttccatttggaatctagattgatttacaaagcgaccctattaatgtcacagagactcatctttcagtgaatataactgggaatagataagttgaagatatttttttgtaacctcagcactctaagccattaacatctacttcatttagccttgaaaacacactattatggtaaagaaaactcacaatccacactcccatttagctaatatgaattcaccagctctctgttcttgtccttatcacagagttatctgacaacctctttaagagctcctcagagatacatatttgagacagtcattaccagtttcaaatctctatcaaccagcctcagggatcataacaacaagttatatactaagataattttgttacctcctaaaactgctatgatgttagtatatatagacaatatacaaatgtagacaaaaatgagaagatcaacaagtagttgtcaagaacctactatgtacctagaaatgtactacaccatagagatggtttattttgaaagaaaacatggtgtagtcattgttacttactacatataattttaggatgaattatacactcagctctatggataaacttaaaagaattcataagttatttgagagatataatgtataaaaacacatttagaacttaaaacttcacaagatactgattgggagtgaagaagtcagttttgaaaataagagcataaatgccacccaacaactaagaaatcaaatagttcaaccctggctgtcttcttcctactccttttgtgttctcttaaccgcttgattggggtagctcttgaggagattttaggtctccttatactttagccaatgttcttttcactgaactaccatcctcctgaatccagcctcaagctagtagtgattttggggggatgaaaatatttcgaggatgttttttaaccccaatcctggagctatagctaaatcccaccaccaatcctgtaagcttgcttctctctccccatagccatgctggatcttcctgtggtgtctttcaacttttaaatggcataaaattcacatttcatcataaatcagattttagttgaaaccatttaaagacagttttctttggtactgctgccctgttaggtgaggtatttggaagaactctccaggcaagtctaaatagtatcattgttataaggtatgtggtaagtaccctatccatctccttacagtagtagatttaagattcagcagaactataaataaagataacattatcagaaaagacaaccaatgaaacatatgagaccattaaagaatgtctctttttatatagattacccaattctctaagtttacttttagaaggctactttctccactttaaaaattttatgtcataattgctgtactttgtagatacattcatttcacagaatggccatggcgactttgccagaatgtgaaatgttctaaggaaaaatgattgttttcttcagaatggtttgagttccaaaatttcctgaagcaaattatttcagttgaatagttactacagcagacatggaattactgaatctcacaaagagtgcctgtgaggtgagactcagcccaaaaagattttaactgttcctcttcccttcatcctccctgacagaaggctttcaattactaacgtactattccctctctctctctccctctctccctccctccctccccctatatatccataccctgatatgaggagggttagagaaaactagaaagatataaaacaaatttaaattttacaaataatggtgatagactctttgagttttcactttgtacttttcaagccaatgtcatatctttacttcatctcacttccactacagctttaaaaggtaggcaggacatacacacaataggaaacaaacaaaatgtacatggagccacatgacctgggctcatgggttggctttgcaacctcctgtcatgaaacttaacctgctcagtctcatttttctcatctatatgatggaaatatccatacttactgtaaaaacaatgagattctttgtagttaagtaggaagacagaggtaggtgatataacttgacagaaattcctcattaaactagagcaggatctcaggtgacccaatggcatcatccagggatttccccacaagagtgtccttctagttccatttactcccaaatctataatacagatgctcatgttttgattgtctaaaaccctgtattaactttcctgatcaaatggagacattttctatatgtttttctattaaagtatttaatcatatgatgttttatatgaatttctattcaaaatatatccatcgagtgttgactagtgcttactagatataatatggatgttacagaggatatgaagttgtgcaggactcagtctcagctctcaaactgcatgcaactcaatgggaggagcatataacacatgcttaaaattacatacaacaagagacaatgcatgaaataatgtagttaagatttatttaatactttctctgggccaaacgctatgctttacttgtcttagtttgcactttaaataatgctatgaagtcagtgctatggtcgtctccattttacacacaagaaaactaaggctcaggctgggctcagtggttcacatctgtaatcccagcactctgggaggccgaggcgggtggatcgcctgaggtcaggagttcgagaccagcctggccaacatggtgaaactttgtctccactaaaaaaatacaaaaattagctgggcgtggtgggggggcggggcgcctgtaatcccagctacttgggaggctgaggcatgcgaatcacttgaacccgagaggctgaggttgcagcgagccaagatcgtgccattgcactccagcctgagtgacaagcacgaaactccatctcaaaaaaaaaaaaaaaaagtaaggctcagacaggtaccatctggttattctgtgctcacaaagataactggccatgttgctccaaagtatttctaggcttttttaagataagctgtagctttctatgaggttttagaggaaactcagtaattcatggtatttatagaatgcaaaggtgtcagtctagaacacaaagacgatcttacttgttggcctctcaaatgccagtggtgtctgtgctcagaaactgtttttattgagatatgatctttccctcttacctaaaatacttcttattgcctcatttctcccttttatttccatttctaagacttagagttgttcatgatcacgaaggaaagcaaaaatggaagtaatatatctgcatgtcagatactagctgaccactttgtgttttatttgatggaatttcatcttcctgattataccaaaaatatttacatttatttagggcatatatttttacaggtttttcttattttttatttttaagatggagtctcgctctgtggtccaggctggagtgcaatggcctgatcttggctcactgcaaccttcatctcccaggttcaagcaattctcctgtctcagcctcccaaggagcttggactacaggtgcatgctaccatgcccagttaatttttgtatttttaatagagatggggtttcaccatattggtcaggctagtcttgaactcctgacctcgagtgatccatccgcctcggcctcccaaagtgctgggattacaggcgtgagccacagcgccaacctacaattatttttaagaagacttctgataaatatttgaggtcatcactttaataggctggataggcaaatcaccgaaatgttattagtacagttacatatttatttggtggtgtaatgaaatatacaattttcataactataacctaagaaggattcgtagtagaattaaaaaaaaaaagatatcccttccttcagtagtaagggtaagatacgtatgatatgagtgggggaaaagagcttttcttaattattttagacataaatagataataaatgtaatgttttaaaataaaagtatttaacttcgaagaacgatacctcataccaagtacaaaatcatatttataagaggaatagtcccattttttttgcttatatggaaaatatactttaatggattaaaccttgcatcatgttttttctttattacccgttttggtattttgagtaagcaataaagaactataatttactttctactaaaatatctctaacttgtcatttaaaagacaaagaatgaattcagaagacttcaataataccaacaccactttaaacaccaatgtaatcctttagtatttatccaaattgctgttccttccttgatcaattgctccagttaccatcgttaaatgtttgtttaatgtgaagtctacacaaagaatgaaaaccatgtgactcagcattgcttttgtctcatgttctctataagatgtaaatggattctggaagcactaaaagtttaaaccttaaaggctttttgagatacatgatgagcagtagaactctaatcaattaacttcgttacaagtggaaaataataacaatggtctatttaaaatatacaacattaaaacttatgccaaaaaaaccacagattttgattataaatgaattaagttcaatgcagaaaatttcaaaaattgagttgacagaaggaagtggaatttgtcctgttgttctggttctgtaataaaggtaagtatttaactttgaaaaaagatatgtaaataccaagcacaaagtgatatttataagaggcatagtctcatatgcctgatcatatggaaaatatgctttaacctattagacctttcaacatatcttacctcggaaaattttctatctagtagcccctttggacaaccataatacctaattttattggttatattgtaaatgtataatcagccagcgtgaactggttaatagatgggaattcgagtcagtgctatgctctactcctctgctgtttgggagtagattacttttgtgttagcttatttaatagtctttttatatgtcttgatttaccaagttgatagagtttattttttatctctttgctatttcctacttgtatagtcagaagacacaacatctctaagttacacagcaacaggcctcaaaccaaacacaatgtatgaattctcggtcatggtaacaaaaaacagaaggtccagtacttggagcatgactgcacatgccaccacgtatgaagcaggtatgtgaggaaatgtctactttggacccttgataatggtgtttcccaggttctgtggaaattagaacatgtgttccctatggtgtctcaattataccttatcctatataaaatagttcatcctctatagttcatagcacttttatatctaagagtattctcctcacactagaaaaaacatgaatctccaatggcttaagtaatctgctttcatgattaatacacggtttcttcagggtgttaactcaggggatctgactataaatcttcttttcactacatttaagtaaagaacagaaatccatccaatgaacttggtccaaaacagttgtgtctttgaacaattgtcatggtaggtatttctcattttgaaaaaaagaaaaatagatgcaaaagaaagcattgcattacaaccgaagtctcatggatatttactgtgaataaccttggctggatatgggaaggagtttccaggtggttttgttcactcctgggaaatggggtaacataatagaagacctttatgcaattttaaatagttcaaatctagggtaatgcaattcactgtaatttttactggtcacatttactatggatcgtaaatgtagagtttataactttaacaaggatgcagtgtacttgacatttatagttcacagaaatccaacttctgaagaatccagggcttaacatgtttttttgatgggtttcataatatatcatatttgtgggtaaactgcaccaattttcaaattttaaaaaaatgctaataaagctgtttcctgggtaagttgaatttatctttccattagaatttgtcccatgggattgcagttctaatttttaactccaactattattttaactattagagttctagtgagaatatttttacatatctgtggatacttctttcaacaagaagatttctagttgacctaatttaattttaacatcctatttttctattttacctgttattatctcttcttctcagaattccaccctgaatgcacaatgttcacagcttcttagggttaataagaccagccggatgagatacatactattggatagagtaaacaagtaaacagtctactcttcctttttacttgaaaggagatgaatgtagataaatgtgaaatagtaagaaatttggccttccctgtgtgaaagagaagtagtagtattttcatcttaatacaagcaaattcattcatttttttcctctcataaacataaaatgcacaccaacatctgacttgatatatgcaccctattgatttctcatcaaccgcctagccttgtagggacaccagtggtgagacccattgctaacaaaaagatactaacttttagaaatgtggttagtagaaaaggtaataatctggacaaaggtgtaaatagcacatggataggatccctgagtgatgatgagaagtaagaagtaattcacaagtgtctgcaggtttataactgtgagaaggaaattcagtgaataaaataactctaaagtttgcttctagttctgcagtaagataaagaccatatggggctacaccattatgtgttgaaatggcttgtgataaagatacgagtgactggaaattttttgaaatcaagcatttcattctgtccagataatgaatccttcatttggttttggttaactgaagtaaaataaacgtgacaggaaggacactttaaataattaggccttggaaagagacaggcatcagccttattattcctaggctgtagaagtgaggaactgttggtttatcccttcaaggtgctaccatagtaattatttgactccaccttttttatttccttgtatgtagattcagtgtcacaaaagagagaatattattggcatcttttgagacaggtgatcacacagctaaggagaagatgggataagaccatggaattcccaactgatattgctaccaagctttcatgatatagaggagagcttgttttccaaagagaaaaaacaagtcctcctttaaaaggaagaggagaggatgggatgctggacagtgcaagtaacaaatgcccaatacaattcctatggctgaaatcttctgaaacttaaatgttaccttccattcatgtacttaataaagaaatggaagtataggaaaaaatgagagccaaagaaatcagagggggccgggcgcggtggctcacgcctgtaatcccagcactttgggaggccgaggcgggcggatcacgaggtcaggagatcgaggccatcccggctaaaacggtgaaaccccgtctctactaaaaatacaaaaaaattagccgggcgtagtggcgggcgcctgtagtcccagctacttgggaggctgaggcaggagaatggcgtgaacccgggaggcggagcttgcagtgagccgagatcccgccactgcactccagcctgggcgacagagcgagactccgtctcaaaaaaaaaaaaaaaaaaaaaaaaaaaaagaaatcagagggcagtgcttgtctagtggaccaagatattaattaagggtttttaataatgttaatttataattgtcatgccttgagatacgaacttggtaaggagaatatagtctatgtctttgagcgaattgtggtccaataaaaaagaaaaagcatttttttaaattcctgaagtaatatcagaaatataatcataaaattgtggacaagttaaaatcagagcaaacaaagtacagattctgtctggaaaaataagaggaagtttcacaaaataaatgaggtttgagctatggcttagttgaattatcacatactaattccagggacttccaaagaatggaaaactcatgtgcaaaaatacccaagcaggtgtcagaaagatgatgtgttaaagagatacttatgattggctcaaagtgagttgagcacagtgttcatgggacaacaaggggaatgaagtacataaaataaaacagaatataaatcctagaggtcctggtgtttatttttatttatttatatttaatccaaagagaatgggtagacaatgaagaatttctagaaatcattccaggcagaactcaagaactcaggagaagagcaaggcagaggaattctgctcgacttagtagggattattgaaattgtgagggccatattatttttcaaatattaaggaacagtgtgcagttcacataataatgctagacatttaggtcattaattccaataccaaatttttattcaccaatattcacatgacttgaggaaaaataagagcttgcacagcacctgaattagattggttgttagatttttttaaattaaataactaattcttcattgtattatattgatagctaaagttgaagaatcactttatcctttttgaatgcgtaacagattcagtgaagcaatctaatcatcctcatttgactattttctaaacaaacatcaatttgaattttaacatagttaagacaaaacaggctattttcactagtaaaaaagacaaagattttaattacttccagaagtggaaaattccttattacgtttgatgtatactaatctaagttattttgtgactatatcttagcttcctattcatagccgggaaaatatcctgaatgacctctctgtgagaataatccttctttaagacagcattgtctttttagtattttgccataatgaatctgcatttcttgcaagaatgtccggatatggtttcattaagccatatatatcatattatattagactgcatatgttattttatactgtattagtatctatgcagtctttttactaagggatcaactatactccacctatgttttcttctccttcattcccccctcctcttctaattctctttctccatccatcccttcttcttttttgaaaatgtgaatatattaagtacattgtcaatgattaaaattaagtgcacgtttggttaacctggaatcccagtgactttgaagatcacggtgttggaaagaaaatagtatgatagatgggaatgattgatgtctcctctatttggctcatatttggaacactattcaggaagagatactagaaatacagtgttaataatgtccagattctgcaatatatgaccaacagaagtacgaaagagaatagggtgaagatgagttcagaattagagactgatttctaactatcttttcctacacagaatttttatgtggagaccaggaaattactccagatcccaaacacggaacccaatacgttctgaatctgcctttgttagactaagggtagcaaagttgccgtggataacagacttgtggcattgtgagctacccagaaggaaaacttgtcttccaaaacgtagaaagtgagagagcagattggaagaagcctggaagatccttggctagcttaaccagtttgctgccacctttaaatatttaaaattgttttgagtacaacatgtgggagaagtagtcttaggagcaggacttcgtgccatcttacttcatgctggattgatactaagacactcatagttattttttacgtcttctattttaatttctcatgtgtgccttcctgttggtttagaagatgcctaatatgtcacctagctaagatattttgaccccagttttatctcattttaaaaactttttggcttttaaggaagtatagacttaggtgacatttttatttataaatgcctgcagttgtaacagaattcttctgaagacatgtaatcatccagcgtggcaacatagacccatctctacaaaaatcaaaattaaaattaaaaattagagtagtggtgtgcaacagtggatccggctactcaggaggctgagatgggaggatcacttgagcccaggaggttgagtctgaagtgagctatgattgcaccactgcactccagcctgggtaacagagcaagaccctgtctcaaaaaaaaaaataaataaataaataaataataaactagaaaaagatatgtaatcatcaatctcactaagtatacatttcttcattcttataatgattcttttatttttagtgtgagcccacttgaaataccagttgtacttttctcctttatattcacacatactctcttctgttctctatagtcacaccttgggaatcatttgatttccataaaaattattaatttttgtatccttgtttgcttattcaaatccttgaaataaactgtaaatggcaaaatagacatgatatacttcttgatagattctgaatgtcaacatcatgatgaaatttccaacaatgtttattttctttcacatccaatgacaaggccttatctctgtctcacctcacagcccccacctctgctcccaaggacttgacagtcattactagggaagggaagcctcgtgccgtcattgtgagttggcagcctcccttggaagccaatgggaaaattactggtaagcatctccactttctctcccagcatagctctcccttgtcctataattgcttaccccctacatgagctgctcctgcctttcgtgtggcattattctgtccctacatctcagctgactccatgaccctttttgattgtttcttctttccccttttgaccatggaattcttctaatggtgcacacacacacacacacacacacacacacacacacacacacacacgtcatttgatttgcttcacgaaagatgtgtatttcaattagaatagacctttttgtttttcattctctgaagcattaagaccactttctaatggagtgccctgagtataaatgtctataaagaagctggttgtttggcaattatgaaacacaaaagatgcttaatgactgtgtttgtgtgtgtttgtgtgtatggcacatacggaggtttggggatttttagtttctcacttaggttttagcttcttacttaaatcataaagttcacaaaacacttaatattgactgacagaaattgaacataatgaatatttcacagtgacagattttattttgccaaatattgctgataacatcaatgcctaattaaagcatccattagaagcctgtaatgttaatttagtatgaaaaatataatggagttctatcagagattttgcatttaaatgatcactttaggcttttaatagatgtctccatagcatataattattatgaaaaatattgtataactcaaaatgtgaacattatagtctaattaacttgaaccattgggttaggaacatggaagagtcactccttttttccttctttttttgcatacaagagctggatagcactattataaattaacaaagtaattcagccgtcccgtgatacagagagataagcatggaaattatactttcagaaggcacacttactttatgtaatttactttctgaattttgcaaaatgaaaagataacgtgaaaattccaaataggattgaaatttaagttgaaaatttgttttctctaggaaattgctcttagcacaatagcaaacagaatttttattcgagctgacaaatatggaaaaagaagtgaggcacaaaatttccccaagatcttatatgttcacttgtcagtgtgccaggccttttaaaactgagactggctcattccaattttctttttttccccctcattgttataatctcttttcattggttctatgtcagtagttgtgtagcttttgatttgtttatattttattttgttataatcaattatttataagcttatgggaaatcaacagtaataagtctgaggagaaaaaaacagaaagctgtctaaataaaaacaggttctgatagaaaaagatgtttttggcaaaggaaaaataagtcatattctccactcatttgaattctccactcttatttaagtaaatcttatcagtcagtgtaaacaatagaataagtttttaactctggaagaaagcttaattttgcttcttcaggaaaaaaaaaaaaatagaagtctagcccatattaagaaatgcaaatttgactgggcgcggtggctcacacctgtaatcccagaactttgggaggccgaggcaggcagatcacgaggtcaggagatcgagaccatcctggctaacacggtgaaaccctgtctctactaaaaatacaaaaaattagccgggcgtggtggtgggcacctgtagtcccagctactctggaggctgaggcaggagaatagcatgaacccacgaggcggagcttgcagtgagccccgttcgcgctactgcactccagcctgggcgacagagtaagactccgtctcaaaaataaaaaaataaaataaaaaattaaaaaaaaaagaaatgcaaattaatctaagcaataaaattgtatatgccaaaatcacagtgcatataaaagaaactttgtccacactctttacttagatttatacgttcaatggatcttactattaaaaatccattctctcacaatggaaaaataaaagtatgggagacaatgcttttgcctttaaaagcctggcttatttatgaaaacaaaattgtattatcaagttgagatattcctactcaatttaacagggagcaaacaataagaacccttaagagaatttctgtgtcatgtgtattttgatttatttattcaaattacttccagaaaatagaatgataaaatattcaaaatactacaccactaagcagagggcacaaatttgctattctcagcttcctgtggaagtgcaacaattaataataaaaagtaaaaaaaaaaaaaaagaaatgagctctttctcagtgcgaccaggtagatgtgtgccaaggagggatgtgctctcatgtaacctctgtattgttttgttttcctaaatctttcatgtgtatggcaggcagtagagcaggatagttaagaactcaggcttctaagggagacacatgaggaagtcatttaacatccttgagtcccactttctcggtttctcacctataaaataaagatagtaatagaaccgcactagaataattgttgtaatacagtgctgagaaaagcccctgatacccagtgggcactgacacgaatcggctattattattccagtttgaaatccattctagggtgaggctttactaatgtgctttatacagaatccagatcatcagtttttaaatataagtactcaaaaagattaaacaaaaaaggaggaaattcagataatcacagtgcctaaattctctgatcataaactggaaacttaggaatttggactgacattttcagaagaaaatgattcaaaatacattaagcatttattatatgcttggcattcttctgagatctttagtatgatataaatgattacatattcctattattccattttaaaatgaaaagcttaggcctttcctgagtaaataacttacccaaaatcaaataagcaagaagtggcagagctaggatttaaaactcaggtttatactcttaattattacactatgttttgctccaatttattagtattctactggtctaaatcagtgatttgcagctgagattttaatttaattcatatgagaagggactgagcatggtaatttttaaaagcttcccaagtgacttattgtatagccagagatatgaaacataggcctaaataaatgcagtgcccaacactatttaagatctgagactaacacaaatagaagagttaggtctttcagagattgtttccttattaatacagtctaatatgtaaggttatattctctttttctgtgtcatttgatagcctagtttaatttgtctcccttttgtaaaatcatcaaaccacttttcttcccaccaccaggatatagcttctcagtctgatttgcagaaatttcttccacttgatattgctttccagaaggcagatctttttattccctttgttactttctctggaaaagtgtctatagtagagttagggattctgaggtttaaaaaaaaaagagaaagaggccaggcgtagtagctcacgcctgtagtcccagcactttgagagaccaaggtgggaggatcacctgaggtcatgagttcaaaaccagcctggccaacaaggtgaaaccccgactctactaaaatacagaaattagccagacatgatagcagatgcctgtaatcccagctactggggaggctgaggcaggataattgcttgaacccgggaggcgggtgttgcagcgagccgagatccagctattgcattccagcccgggtgacagagcaagactctgtctcaaaaaaaaaaaaagaaagaaagaaaaaagaaaaaaagtacaggtacagaaatgtagtgagaaaccagtacatttgttcaacctgtgtggttatatagaaatttataaggtaagcttcaataatgaatttattatctctcaaatataccaaacatacacatcccaatgaagttgcttgttttctctgaggccattttttagacttttgaatgatgaggtctgtttctattctccatctcagttcttaaattttaagaaaagggtaggcttcaccacatatataaggaatttgctcagatacaatttggaattgtcagaaactgatgtctgcaccttcaactttagtttgatcccagagctgtcatttttaaatgcttaagtgaataattttacatagattaaaaacatagtgaagacaaatattttatcatcatctgataaatgaggagactcgggaatcagtgcagttgacctgggatgggggcaaaattctccaattttccagtttcatcatgcacttaaaacagcccatgaaaatttttaacgatttcattaaatatctaaatgtaaaacttatgtacttacaggctaaaggatttcattcaataagtgactttcgatacctcttatgtgaatatgattttattagatttttggggggaataaaaaagtaataagatatggctcctgaactaaagaaatgtttttatccttttgaagaggtaggacatgcacataatagaatatatacatatatatatacaaattttatatatatcttttatatttagctgcatatatatatctccagtgatttttattctggatatatatatatatatatatatatatattcactattactctctctatatatatatgttcagtaacttttacatagataaaaacatagtgaaggcaaatatttcatatatatctataacatatttatcttagatatattacatagtaatatatggatatttatagaaatgtatactcagaaatgtgtgtatgtacacacacatatatctccagtagcagggtcttctttttaatagatgtggagatgtggatcttcatggacaagattggagactgctctggttcaaagaatatgaggcaattttattgatgtttatcatgggggctgaattacaaagggatggacacacatgagacagaaaacaactcctttatcaaacgatattcataatcccttttgaattttagaactccaagtttaatatttaacagacagaaaggtcatacaactttttaaggtttgtggaattctttatgttggtaaggcttttagtttcgaagctctcaacatctcaagatattcatattttcatcattgacatcacaacaaatgccaaaaatgtacagatcccacatatccattatgtccctgaccttgttgatcacagtaatcatttggggtgtagattactgaggttacccttgacctgtagtattagaagcctattgttgtatagcaatattatcacaaatgtagcagggtaaaactgcacatatttgttatcttatggtttttgtgagtctggaatctgagcacagtttagctttggggtctcttacaaggctgcaaattcaaatgttcacctggctgaggtctcatctttggtttcacaggggaaatagttgcttttaagcttatgtaattgttgtcatggctgttggccagaaaccaccctcagttcctgccacaaagtattctccattgggcagacgtcttcatcaaaggcgaaagaagagagtcgggtatctgctagcaaggcagatgtcatgatcttatgtaacacaattgtgaaattgatattccattgcatttcctgtcttctatcggttagaaacaagacttagggcccatctacataccgacagaaaggaatacacaagggcatgatattactagaggatgaggataattggtggccatcaaagattgtttaccacatgtattaaatcaacatatcctgtcttggggtctgtattttatgatctgtacctatccttcaggtaactattatgattacgcagatttgggaaataccaaacctaggggaaaggtgaaagtcaatacaaaatagatgtaagttttcagcattgttcaaaatttaagagaaatgggcttccagatgttggagattgtaacattgcttaatcctacgtaatcagaaggacaaaatatccagtgacgcatcccccaagcccaggcataattctataaggcactatgggattaagtgatgagtgatataaaatggcacatgtgtttttactttattgaagtgtattaccatgtttatggagaggagagcttgtgattgaggaaggtttcataggccagatataccttaaagtagaccttaatggatgagtaggatttggatggagtgaagaaaggtggaatggtgtgggaataagcgggaaggaagaagaatcatggaatggagaatagtcttcctgtagcgaaggtttgtgctgagatgtacatagtgtgcatggctattttctgagtctgagaaccctctgacataacccttaaccactgcgaagacctgtgggtgaaggtccccagtccagctgggacaagagggactcaaaaggaaagaataggtaaatcaaaggaagacacttgttcttaagaaaacgacttacaaagaatgtatttgatgcataaatagaatgagggacacttatagcctatgttatatagatagcattgaagaattgtggcagaaatggagatcagcacgacatttgtttatcaatgacacctatcatgagcgcctttacggtgttatctggcaatataatataaaagttgttgattaatgtttttaaattagagctaggtcacaaattggttaagtataatgttagagtataaatatgtgacaggaatccatgaatttgttcgggtgcatattagactatcatgactgagtacacacaactagcactcaagtaacatatcccctaacacagaaaatcaataatactatataaacataggttattaatatctgagataataactagatcatgtacagttatccagcaatacttatttctttgacaagctagactggactgggagaaatagtatactggtaaagaatcccatacatagtctggtggtaaagaatattgcccagaccttttaccaatcagtttgggtcacctgcagcttcaccgtctgtgaaaggaaagcaacaccgcccctggcaacctcactaagttgttacagtgatcaaatatcatttatttatattacactttaaacatgtatagcattttataccttccaatacatttttattaagcacaagccaaaataaatattgtttattttcatcattggactacagggaaaattatacagacttgttatctctgttttacatttttcatcatgctttcatattagaacaaactaataatcaggatttataggtagcagaaagcacacatttttaaatgtggcagatatttttacttctaacagcttattctattttctgattctgtacattgcagcaattatttatctaatccttgcattatgaaaaaaagacattacttacagaactgctgtagtttacagattgtggacatataataattattgtaaattacatttgggaaacctgggtgtttggaagcagaactgcagcgtgtaggacaccaaattaagtcacatttgtctatttatgcagcttacatcttattttataccttggacaagaacatcccaattgatgactggattatggaaacaatcagtggtgataggcttactcatcaaatcatggatctcaaccttgatactatgtattactttcgaattcaagcacgaaattcaaaaggagtggggccactctctgatcctatcctcttcaggactctgaaaggtttgaataatttcctattatgcttttcttttcctgtgggattgttataaaatagctttgcactctgtgttagaaatggccctgcaccatctctattagcaacatggctgcagtggacattcaaaataaattaaaatgtagctttttatgctcaaagccgacatatcaaagaaagatctgccatcagcacatggcaaacatatttaacatgacttttttcatttacagtcctgctagaagtttattgatgtcatgtatattggttctattcaaaatataatgaaatgcttcagccattttatgtaaggggataaaaattaaaatgtattgaattatgtgaatagcatactattgccgactttaggtattttctttcaggtactattatcccttatatattaaagaaaattttgatatgacaagacagaaagttccaaaccaaaaaaaaagtctatttattgtaaagaaccaaggtagaaactataaaaaagttgcaatatgatatctagaagaaaaaatgttcatacagagaaacactaaagctgaatagtagtgattacatcaaaatattttcatgtaagtacttactattttagagcacagtattatttttctgggggacaaatggtttgaagagtcatttaacaattgaaaataatttgaaacattcaaatgattacaataatttgaatgtttaattcatttaacaattgaataatttgtaataagtttcacaactaatatttaaagttgtatatttaaggcatgatatgtgttgttctaaagaaggataacttagctcttaaatctgtgaccacatcatacctctatatctggcagaaatcttaatacatgatagtaaagtaaaaaattagaaacacacgtatgattggcttcttctgtttgacatactaaaagaagagtcttagtataactgtatagcctattcctcaaatcttctaggaaaggtaccctagtaaataagggacttttgaattctgatgagtgagctattcaaaagctgggttttggtagcagctaatctgaaaatttgccaacaacacacaagcaagcattcagccaaagcttgcatgacagttcttaatggcggagtagaagttgggaggaaagtaggatagaaatgagttcatctttgtcatctaaattttgaggacttcatgtctaaatcaggtttcactccaaatgagcaatcaaaaggcaactcgttattcattttgtggcagcatgaaatgtaactagatagtgttttgcaaatgcttcatttttatctatagatgagtgccaaattaatttcatactcataatgtttgccaactgagagatctgaggaaaggttgaagatgacttaaggcatccaaatgtgttaaacagcagagtgatgagttatcataagatttgcaggcccacattgatagccatcccaggaattgtttaatgagctcagtatttcatttggtactgtttaccctaagtgccctaaacacatctagaaaactaagaacaagttcaggaatttgttctatgacataatggttcaaagagttatttctaataccctgatttgaagtttaatattgtctaccctaaatgtcatgctcgataatagtcaattctattttaaacacatgttgtttatatgctaaaataagtttttgatcatttaaaattactcagaaatattgatattggtcacttttattaataattttgtacatgtatacatcttacaagacacctacaatggcaaatgttctaagacaaataaattactcatcataagagatttcaagctacaacataagcattttaaagatttggtgtagagccaaatctacaccaaagataaaatcatgctattgctctctgatttaagattttcacttcccaaagctgcagcagagcatactgtgctcatcagaatgtaactttgtttgcctgagacaaaggcttagatgtcccgaagctgagaaaactcccagtactcactgggtaatgggcaagtatttcatagtaatgcttgtgccaggcaggtgtccacgaacgtcattccttcatatttagcctttgcaaggatcgcagcattttattctagaggctagcatttggtctttttgatattaacaaccagtcagagaagtacaggaaactcagtcaataatcactgtttaattaaaaggacatttgtaattagaaagggattatcttactgtaaacttatgtaggtacacatatatgatgtatctaattctttctttggaatgttaattaaaagaatcttgaccttgattacttgaccacataggaacctgcacatacccacctttccactaatcctccccagggtcccactgggatacatacacactgtcaaactattggaagacttatgtctatctctgccctatcctgtgggtttttcctgctgataaagcatgcttccccatgctggcctatcgggtaatagagaggaaggatgctcccaatggagtagaccacagaggattctggtggagggagggagtcacttcctacacacaaaagagtggtattcagagtgaaagcccaatagagtacagtaaattctctgggcatccttagtcatcattctgaaatgtgcctctcccctatccaagaatatagcactgaaagctttggaccagtatagaaaaaagttctagtcgtcaaattcttttatgacaaaaatacatgatttttcttgacaaatgatagaaacatatgatagaaaaaaatcaaggcacaaatgtaagccatttttgtctctaataaaaggtagttatgagaatccatatggtccctgttggaaaatactcttcagtagataacattttgagacattcaaaatttctcaagttctattcagtgcagctttgctagtagaaaaataaattcaaaagataaaaatgagaatgggtttgtctatcattacatgtggttatttatcccttgctaaaaatatcttagactgcagacaatgcatgtatatgattaaagataaagggcagacaaagaatggagataagggtggtagtctcgtcttttttgacataattctaaagaattctcacctaaatatgagatgctgatgaggatagtttcttaaatgtgtcccagtctggctgccaaacctacatacttcctggattgggtgggcacttatgaccttgacatatcttgtcaaggatcaggtcattcttgctggggacctgtagcacttccaacaacatactgtcctttctcaacagctgtgttaggatctcagttcaaaatcgtattcctgtccataagctacatataatgcaactgcctgtcaaaagcatctttatcaatactataataaaacactataataaaatgtatttgagaagccattaattttcaatgggaaacagaagagaaactctagataaaattaaactgtggtgattaaattaaatggctggtaaacctttaaaaatgtttgttaaatcttgacaaggtacaagatttcataaaacttatttaaagctttcagagagcaccaaattctaaccactagcccatcagagagtgtcaagataaataaattctgcagctctactatgcagcatagttcctataaataatataactgtattatgtacttaaaatttagtaaggtggtagatcatatactgtgtttttaccacaataaataataataataataaaatgggtgggaggaaactttgggagtttggggcaagtctgtggctttgaaggtggtgatggtttcataagtatatccttactctcaaattcattgaattgcatacattaaatatgggcagctttttacttttcaattatatctcaataactttttaaaataacgcttatagaattgtaaaattataaacattggccgggcgtggtggctcacacctgtaatcccagcactttaggaggccgaggcgggtggatcacgaggtcaggagatcgagaccatcctgactaacatggtgaaaccacatctctactaaaaatacaaaaaattagccaggcgtggtggcacatgcctgtagtcccagctacttgagaggctgaggcaggagaattgcttgaacccaggaggcagaggttgcagtgagctgagattgcaccactgcactccagcctgggtgacagagcaataataaaaatcctggtatatgtagtgtttcccaaagagtaattcacaattcaaaatctactacttatcaagatatcttttcatagaatatgtgtatatgttatgtttaaatgaaagaaattgtaattgatttctgatttagaaatcactcttaggatgtaatagacataaaccctgttcatctgaaaggggctttcgttaacagaatcaatatctacgtatttcagttctaaacattcttattaggcaatgatttgtgctgctttatttagaaaaagaaggaccaccacctgtagggcgtttaaggtatttttcaaatgatgattgatttgctataatagcgccacatctgatgagagactgtattatcagttgctgcctattatattttctctatgtgaattttactgagacatatacaggaagcaatcggcaagtgttgtatcctacctatcaagtttgaatggaatcaagtgagttaaatacgcccaaaagactcaaagctcaaagacggtcaagtctaggtaaaaataattctactagtaattgagggagggaagcttatgaagatctgccttggtcaaaatgccatgtaattttcagaaatgtgataatactagagatttacctcttatttagtttcatctggttagcagaaaaaaaaagtcatctttaaaacaaaatttagcaatttaatttttatatttttaaatttaaatttcaaaaagtcatttttgagactattacttgtaagtcctctgaagttgtcaacaacaactcaggagctatcttcacaagggctaaagtttatcaagatatttagattatattgtaccatatttatggttgccaattattttacccagtctatgtgagaattggtgaagttgtttaaaaaatagtcacatacaagaaaatagcttcctgaattttcttaaatatatatatgggtgataattacttggtaattgcatgcagtttttttttactgttaattctagttttaattaaatttatataattgttctcagtttatgtttagagggatatgaaaagtaagataattttaggatgaatttgtacagcaaaaacattattttcaattttttttctctgaatacttatttaatagaaataaacatgtaagtttgggtccttatcaattttatttcaagagggcactagctttgaaataaaaacttactaaaaagaactgttggtttgatatgtcagctttcttgctaggaactgtcaaagtctaataatgttatttctttttcccccgcagtggaacaccctgacaaaatggctaatgaccaaggtatggtggctcaatctgtcattttgtgttccttgaatcaatcctgtctgttagacatgtcagtcattactttatattcctcttttcacctggaccatacacctgatgaagcagacactggcgtgacgattaatcttgttaatgaagttctgcttggctgaggctgcggctctgataaggaagatgtaaattttcttgagaggaaattgttttgtctccattctgaaggaccaattaaaatgtcaagcttctttgtatgaaataaatttttagtctctgtctgcacttctgaataattcacattaagtataattaagctcagcataattttcaagctgctcttgcaccctttcctgagctatggattaaagttctgtagctctacagagaaaacccgtaaattatgtgtgattttcctctgcaatgagcttcttttaatatataaaatcaaagttgggtcaccttttttagggcattatcattgttcattttgaagccagaaagctcttattcagtgaatcagatgctcatttgactcacagcacagtattttctcccttttccttatttatttactaaaagctgatttgtatagagaaacaggtaaagttttacacaaaggcaaaatggagataaataagagttatccatcaacttataagtggatatgaacttactattaccgtgatttgtagactgattgataaattaggattccgttatctttacacaaaggacaattagtagaaagctgagggagacaatgaatagtttatgagttttatttttttgaggatgttactttctttccagaagagttaggaaaaactataaactggttgtagtcagtgctgtcagtatttgtagattgagagtctgcagttcatatagtttgtttccttcctgctttggacacctactgtgggcagtgcttacttgcaaacgtgtctcataaggcaccatgtcgtgagattaggggaatgctttctttcaacaggaatactttttaacttttgacaaatactaagcctctggatgctggctctccctgacagcagaatgcttcctgcatgagtagcattttcttcagtggtcctgtgtttacattcttctctggcgatgtatactatgcagctgcttaacagaacatggctaggggtttacgtggaataattgaaatgggactgtgcacagcaatggctactcagggttaaggttttcattaatctagctgctcctacttgcttccactgaaaatgttttcatacaattaatatctactaaatgagatttgtaaaaaatattaatgatgagtaattatcacttggcatgtatttacataggtaacttaaatattagtcttggtcaaatccaaatctggaatagttaatagcaccagctttattattgcagttataaaacaattgaaacaacctctcataaccttctttacttaaataaatttgaagcttccgtagacagataactcctaagttttgaaattatattttaaaataatagagaaaaagattaaaataactgaactagttgaaatgtcattattagtcacttagttgacaacaaacatgtccaggcttctcaataaatggctttccacttctctctgggtactattatattgttttttcttttgttaattgcttttagttttttaaggtgactgttttgcataatattattttaaaccaccacacatatattctgtaaattgattattttatgaaaggcaaatgagtaaattatttcccagtccctatgatcacacatcctccatggattttactttgagtctcacatctacaataaatcaggctagttctcaggaacaaaaggaccccctcaagaattactgccagtggctgagtccattaatatatttagtcagttgttctttttcttcatctaatattactcagaaggattctgtcacatatgtaacttggagccatattcagtcatggttggcatgtagttagttgatcaagttgataggttctaaattttacatcaaactcaattcacttataaaattgagagggactgatgacatataatttagtggttataaataatatcttcaaattcttacaaagaaagcatataaaatttgctgcaccctcaaagcacgttttataaacaaaatcagtcttctgagttgatgaccacatgcatgagaaataacccagattaaagatccctctaagattgatgaaaataataggaagaggctgatcttaatactcccattcccagaacacagcaaattagttgaatatgttttaccattcccactgttagacctatttgcccccttctcatggagaaatgatcccactattacatttatgacaggagctgagtttctgctgagagaaaattccctcagagaaaaaaatgtggcatctggggtcagaattaaccttgcaaagatgaatcctaaataaagaagcaagaggttgaatttgacttatatgagagaaagtgagaccagttttgattgtcctaaaaaaagtatctgttcagattcttgtcacaattattattattttagggattgaagatctgccatgaagaacataaatgtgaaaacaatagtcatttgaaatggttttgatttggagaaaatattttcttctgagcaatggtatagtagttgtttgacaatgataggcaattaacatagaacccctgatttctttatgtaattgtaaattgatgaaatatagcatttttaaaactttctaatcttgaccacctctataattctccttttttgcatcaccctatctcttgctccatatcctaattatttctgtagattcttccaggcacaggtggcaaataagttgggaagtaaaagaaattttagagataaaccagagtttcgttttttgtagggttgggtaaggaaattgcacaggctctatgaagcgggtgcagaggttagatagaaaatctatgctttaaaaattatttttaatttttgtgtctacatagtaggtgtatatatttgtagggtacatgagatgctttgatacaagcatacagtgtgaaataagcacatcatggagaatggggtatccatcccttgaagcatttatctgttgacttacaaacaattccattacactgttcatttaaaaatgtacaattatattattgactatagttaccctgttgtgctatcaaatagtaggtcttactcattatttctaactatatttttatacccattaatcatcttcacctcccctctccccagccccccactaccattcccagcctctggtcaccatccttctattctctacatcgatgaattcaataattgttttgatttttgttttgacttttgattttttccctttttttctatattctgattaaaactccttcaatttgtctgtgctgttgtgggcctatgtaatggtaaaatgaaccgctatgcagctcttgccagcagtcactgttttaaaagctttacaggagtgactcacttaattctcgtaacaatactgtgagaaaggtattgtctccattttagcaaggaagaaagtgaagctcagagagatgttatttgtctattgaaacacagctagtaagtagaaaggccataaatccaaccccagaaaccacattccaaaagccttttttttttaattattctatttttatttattttttttaattttttgacacagaatctcactctattacccaggctggagtgcaatggcacaatcttggctcactgcaacctctgcctcccaggttcaagcgattctcctgcctcagcctcctgagtaactgggattacaagtgcgtgccaccacacctggctaatttttttgtctttttagtagagacaggatttcaccatgttggccaggatggtctcaatcctcctgaccttgtgatccgcctgtcttggcctcttaaagtgctgggattccaggagtaagccaccatgccccacccaaaagccctgattttaaccatcaactgcatgacaacagatatgttacatgtatatagccacacattcacattcgacgtatagctataaagttgctttaactgaagttttgtttgctgttatttgtcctatatagatcttccttttcacatctctgaatattctaaagaacaagggaaataactctcaatctgaggtcatcttgttagtggggtggcaacagcgctgattacatgatcctgacacttctttatttcaggaaacagggatggtgataattcactgtctaagccagcttgggttgtcaatacaaaacgctatatactgggtgggttaaacaacagaaagttatattctcagagctctggaagctggaagtcccagatcaaggttcagtgtggtcagtttctggtgagggtcctcttcctggcttgcaggtggccttctcgctgtgtcttcccgtggtggagagtgacctctctggtgtctcctcttcagaggacactaatcctattggattggggccctaccctatgatttcatttaaccttatgatttaattacttccataaaggccctatattcaaatataatcatattgggggttagagattcaatatacacatttttggggaagcaattcagtccatagcatccacatttaaaaagaaagctgttatttcactccttcactaattttttcccagtttttcagaagcagaaggtaaacattttacccaggatcacagaattagctgttggcagagttagaactcaaaacttttctttctggttcctagagtgtgcagtctttctactgtaaatggttactatatttaaacatttgatttccattcttctaaaatcagctccaacattttagtgtctcacagaagcattttagaaaatccctttgttttgagtttgcaatggaggttagctgtaactctgaaacatgactgcttcttaaaagtgattattagatcaaacttttaaggtatttttgtttgcatcgttatgtcccatttaatgtccaaatattgttctccactttgagatgtctttgtatgaaaatcgatattcttagcatgagcagaaatgtttactctttcatgtgtgtttctacgtctgctcattgtaacaataggtgctatggcgatgatacagtaccttaaagtgggcaggattctcatgaagtgattttcaccattgctgagatgaattacaaagaaaatgctcactttgagcactctcaagtgtatttaattctccatgacctggaaaaggggtgatctgaaacactagacctagagaagaggcctacgtacatagggcagtttacagatccagataaagacagcctgctgtaaactgcccgcccaacaaggaggaagaattactctcctgtgaattgtggtaatggctgataatggtctagcttttcatttggaagtcactcagtgtgtgctataggagcactggaatggaattagatactttcagttctagcacagtcctgccactgggacctcttgtgtaatgttgggcaggtgacttaacatctctcaacatcctcacctgtaaaatgataagttcagactaaattatcttttggtttctttcaagatttaagattctgaagttttaaggttggtattagaataaaaactcaggcataacatctttgcatagtgaagcatctcacatttatggcttttccactatgtgtcaattactcttctatgcattgtgcacatgcaatcctatttgattcttatagcacccttacagatgtagaaaaagagacagagaggttaaaacttgcccaaacactcacagtatgtaagtggtgtgaaagttgattatacaaaatggagtcactcatgtcatacccaactaaaatggagtcaggaggttataaggaaaagcactcagatcacatacatttattccaggaactgtcttgtgagactaaacccaaaacttcaaggacctggtcatgattctaagattccacatcttacttaacacctgctgacactcagcagctcctggaagacactaccagcaccaattaacttactttcaaaacaacttgcataaccttcctctattccacaataaaactccgcctttccctttattctctagactcacctggggctaccttggtttgggtgtcctgaattgcaattcatattctcaaataccttcttcgctcagagattcacctctatgtatctttattttaggttgacagtgattaggcccagatacatacccaggctacctaactggagaatctctgctcttgacgttgtgtaatttctggaaatgcagactcatgatctgtcatcaagaaagttatacctaaatggcatcaccataagttcacctagtttaaaggactttgtctttccttaatagggtattcaggcaaagtacttaacactgcacctgccattttacacctcagcagttttaatctcatgaataaacagaatgttaattgtttcaaatttcagggaaatagggtttttgaggcagtctagtcaagcttggaatttagttaatgtaatccagactttgcagggtttggattacagcagccagactgccgtttgaaaaatggaaacctttagtgccttctgatgggagctgtttaattgaaaattaaaacctcttcttaccctattattgtgcatagtttcaacacagtttattattcggctgcttgctacacccacttgaaaaagctattctcacctgggtttttcacaggttcaattctgtaaattaggactgtggtgaaacagtagtagcagaaaatgaataatgtgcttttaatggagtgttaaggtgcttatcatgttcccagcaagcagtcaagtagctgcctatgtcaacttctcagcagttttcatgttttaataggtaactctgaaggaacaaaaacgtactcagtactcataggaattgatgtgattcatgggataattttaaccttctcacacctgtaaggtagacatttttgtttatacacttcaaataaaattccataaacaggttcttcttgtaagagccactgtattttggatgccatttccttgtacagatattggccaagtacacggtcttcctagctttattttctgcccacttcaatcagccctagattctgccgcttcaattttctttccaaaacagatgggtcactgttgctttggggatgagtcagttctttgacatcaagaaccttggctatctgactgtaacgtctctttcctggtgtcatggccaatagatccctccacatatgccacaatcacaaatcaccctggaaaaagtgcatttttcacaactacatgctgtaatgtgtaccattttctcagccttagctgtgctttctctctttctcaactaagcaaagtcttctttgagactcccttctcaattttacttttttcaagaatcctttcttacctttcttgtcttttattcacctgtattttcataacacccatcctatttttattgtgttttccatttcttcttatactttgctatttatattcttagcttcttgaccagattttaaattcccaagaacagagaactggctagattcttcacattgtcatccctacctccctaatttagaatttatcctattttagttgtctgataagtgtttgtttaatagaatcataacacaaatgtttggggaagcagctacagagtaatctggaaagataagttttaccattgaatgaaaagtgtagattggacagctcaaagtaatagtgcacatggctgtgtatattggagatttactgatcttgggggagacgagaagttatgcatatatttccaacaggaaaaagtatattcaataatcacctactaaaataaatgctaaatagaaaaacaagttctctgtaattcagctgatggtagttacatttgtagatggctacgacctcctgcactcattttgtgacctccagtcttgctgtccttccttgttagcagaaaatttatagatttgaatttcaccagctgcttggaattctgagtacagaaaggagaaaatcaaaactaatggaagctgataagtttgttaaaattgtggctatgaagtatgaaaagaactagactcacttttgataacttgtggattactatgtatccagtactgtgctggcactagaaacattagaaggaaatggtcctggcaaagcattagaaggaagtatggttccgtgggtccattttcaagaagcttgcaatatagttaggaggaggatattaacacttccagtccagtatgaaaaatacaaaatgccaaatcagatggtactgtctacatgtgtatgttacgggatttcagataaatcattgtgggctggattagaaaagacttcttaaaacctaagactgggctttaaatatatgagtagaactagactcaatgcaaactattaccgggggaagagtagctgatcccttatgtagagaaattctaggatggaaaagttaggaagccaagatgctgggaaaatagtgaggactacaggatgggctccaggaacatttaggatataatttgctcaggcacaaacatatctcatgcctacctttgcagagtagtaccttatggcagagacctatgttggtgaagaggcttttgctatttctctctgctctaatgtagtagttctggggctttcctacttttcaacatatcagctagctattgtctacactggccagtgaaggcctgcctgctcccttgtatcccgagccctggaaacccatccactcttggttgctgatattgatcatttcctgcttggaggggtgtgactgtgggatagggagagaaaaggatgatgggatgggagtaggaatggggcctcagtagcagtcatcttcaaagaattttcttggccttttttttttctttttaaccacttctgttgtaccttttctgaagtggcaacttcactttttccagtactctgcatggttacaaggaaactatttttcattctctgccacagccttgttttgttctgcatgttcaattgagaatagagccaccatctcaagtcatacatacctaaactctcactcttacaccccaagaccaactctttgaagtgctctaatttctgtccacaattttccccgtttctcctctcttttttttttttttttttttgagacagagtctcactctctcacccgggctggagtgcagtggcatgatcttggctcactgcaatctctgcctcctgggttcaagcgattctcctgccccagcctcccgagtagatgggattacagtcccctgccccactatgcccggctaaatcttgtatttttagtagcggtggggtttcaccatgttggccaggttggtctcgaactcctgacctcaggtgacctgcccgcctcggcctcccaaagtgctgggattacaggaatgagccactgctcctggccccctattccttcttttagttatttattcacctataatgctaaaatcatcatcatcagagtcatacagtatcagccacttcaaatgaaaccctgtgtttattcatctttctgagctatagttttctcagctataaaatggggttagtaatgtctgcctcagagatgcataattaatattgccatatttattggaacagtttattctgatccatttagttccacagtcatccagaataatctttctaaaatatatgtgtaattagtcagagttttgcttaaaatatcttcagtggatccctatcctctataaaataaattctagaccattttgcagagcatttagggagttttattattgtacctctgccttttttttctaagctcatccacctcacggttctctacctaataaatcaagacagatctttatctgtccagctcctttggttccctaatttttgccttttcagtttttgtccactctcccttgtgagacatcaagaatgtgggaatgagaagtactagaattcacaggagtaaccaatgtgtttcttaaaatatatatgtatgtgtctgtgtatttatatatttatatataaatacatatatatttatatattacatatttataatatatatttataatatatattatatatttataaattttatgatatatatttataatatattttatgatatatatttatactatgttatatatcatatatatttatgatatatatttttatgatatatatttatatatttatattatttatatatttatgtaatatatatttattatatatatttttatatatgtatattttcccccactggttggcctggcaaagtatactgcttttactttggtgcttgcaaaaagaattctcacctcacatgccacctcctctgagaaaccttttgctaggcataagtagataatcatcctgtttttccactgggtcacgtgtttgtttgttttcttttttttgaatttttggaaattaccatatggttgtaagtattcacttaacattttccgtctcactgacttacaaacttctgcaatagtcattttatattcctaatgcttagcactgtgaatctacttaatgcatttgttgagtggatggatgaagcacggatggagacataaatgatgaaatactgtgctccaacagtgtcgttatctacacagactagcagggcaccagcagggtgctcatgttctagtgttttcagactgcagctgcaacttccagatctatagtcacttggaggagagaactctctcatcctcttctgcctcttcttcccgggatgcttggcaaatttgctcaggcacaaacatatctcacacctgcctttaggataagcttgtgaaccacgcagatgggggaggcttttatggatcattccgtggcctttgagaacagatgctcttttataagccaaaaaagattgtctcattctttatgttgtagcctggcaaatgaactagctcttggaaatatctagtcatccaaggcagtgcccatatttggaggaacagaatgctttttagattttaataaagactaagctgcatataaaagtggtttcttagacccctaggatgactgttacttcagatatactagaggcaagtgtgcataaaaggagattccaatgacaggaaggacttcagagaccaccatctaccaccatactactgatattatgaagccatctttatgttttattctattaagaattcaattgttattcagttgtttcattcctaacttgcatgaataataattataataactaataaacatattgggctttagctgtgtggaaggttgtgacaagggtgatcaggagcagctgacaagttatcagcagccgggcaagggagatagtcaagtgtagttattgtcacataggttagaacttatcatcttttctcacctgaaatctttaagaaggaggttaactactttcctgttaacaaaagatcttgatctgtccagctcctttggttccctaatatttgccttttcagtttttgtccactctcccttatgagacatcaagaatgtaagaatgagaaatagtagaattcagaggagtaaccaatgtgcttctaaaaacagaaatatatataatatattaatatatgatatataatatatatatttctttttatatataatatataaatatatacatatataatataataaattatatataatatataataatataatatataatataatataatatattataatatataatataataatataatatataatataatataatatattataataatatataatataatactataataatatagaatatatcatataataatatattataataatgtgtcatatatcatataatatattataataatatataatatataatataatataataatatataatatataatataataatatataatatgtaatatataatatagaatatataatattatatataagtatatataattataattatatatataattaattatatatttaataatatattatatagaatataataaattatatagaatataataatatatagaatataatatataatatattataatatattgtatataatataatatatgttgtatataatataatattataatatattgtatataatataatataatatattacatatataatataatatattacatatataatatattatattattttatatatattatataatatataatatatattttttatatatttatattgtatattttatatattttatatatttatgtattttatatatatataaatatatttatatatatatttatatatataaaatatatatttttatatataattcatatatatttttatatataatgtatattttatataatatatatttttatatataatgtatattttatataatatatatttttatatataatgtatattttatatattatatatatttatatatattatattatatactatatattttatatataataaattatatattatatattttatatataataaattatatattatatattttatatataataaattatatattatatattttatatataataaattatatattatatattttatatataataaattatatattatatattttatatataataaattatatattatatattttatatataataaattatatattatatattttatatataataaattatatattatatattttatatataataaattatatataacatattatattttatatataacatatatatattttatatattttttatataatatatattttatatattttttatataatatatattttatatataatatattatatattttatatataatatatattttatataatatatattttatatataatatatatattttatatatatataaatatatatatatcggttggtctggcgaagtatactgcttttacttgttggcctggcaaagtgtactgcctttactttggtgcttgcaaaaaataatgcagtatttgtaaacgtttttcctactttagaagatggtctctgcaagagaccacatgcatgcctcagacagtcaagacccattatcaggctaagatgtaaaccaagagcagaaattaggataagaaattaatttgtttaaatttgtctaggatacccacagtttctattttgtatcctggtattttttttgtaataactgtatgctcactcaatttcattttattcgtgtgtgaaattattatcttagttttgaatttgatttctaaggatttttaaaaaatgaatttacttctcaggaagagtctaacctgttcatattttatggcctaaatacagaaattggaattgcaaaaatactactacttatgattaagagaaatatgggtaatggcatatttggttttcttgcactttggctcagagtagtttaccaaatgcattcctatcctgcagattattgcccttagactttccacaggtggaaaataaaaccaaaggttttgaagaagggaaagcagcaagaatttgtagagcaccagggctcaatattggacaggcatagcagtaacaatgtattttctttcaatcagtgaactttctttcatgttgttttgaaaacaatgtgttgaaccttaggaaaaggttaagagagctcattagttcttttctattaaaatatttgaaatatcctacgtgttggttatgattttgctttctggtttttgatgcccgatgcctttgtttaaaatcagcattgttatcaactgcctggtaaaccgatcttttagaaacacatttcagcctctgacaaatcacctactttaaatacggtctgtgtgtcagatggacagtaaaattatattcaggtaatattaatggatattctttatctgctggtatacaagacagaaaatcaatgcaatttctatcatcattagaattattttcagagaacaaattttaagatcaagaagatatctcagtgctcagcacccttggaaagatatacattgaacatttgttagatggccagtctgtccatttgatttagattatggacaatacgtttttctctagggattgattgtatgaacgtcgtcctggatgaccctctcttatgcccattcagggaagatggattaaacaaacgattagaactaccacatccacttttctccatgtcttctgcagattaattttccattctctcttctctgaacttataaacaatcacacagaaaaactagactctaggactgaaatcccaattgaattaatctttgttcagtgctgaaaattttttatcgtggaaaagattctcaatctgcccatgtgtgctgcaaataaggatttaatataaacattaatgttatttcattttatacgtacaccacaataaaaacatgcaaataattcaggtgacatgtaaggataataacataaataataaattgcataatagtaataacttaagatttgtacttattattaaaacattacaaagcatcctagctagcattagttactcataggacattgagaacacatttttgcacatcacttcagttagcacaaaggaatataacaatgaacagacttcctaaaggaagtcatattacttctgccaattttttcttcaattcagagaacaggtagcagggagatcaagaagacttttgtccaaggaagcatatggtatgtgccaaaaagggataaaaagaagattccttatgaggcccatcttttaaataaaatgtgtaaggcaaccccttaaacgactttatgacattttaaaaattcaaagaaaggagaggtatatgaaatttctgattaggacctgcctaagcattacctaaataaaatatatttaaatatataaaagctattttgaataactcaaaacagctacaaactccctctgttttaactcagccaatgcccatttaatatttatttaatttttgtttctgaagctaccatttcctggttccaaaatctaaggtaaaagtagaaaatcatttgcttttattatcaaaactttggcagaagctttttttttttttatgaaattagctgcataaaattccaaagttgttaagtgaaaatcaattaattactctttaatatctcattcctccccatcctcaatttgtgttattgagaaaatatgggtacatagtaatccaatacagaattcttctttatatcctgtagaattatattcatatagtacactttgttttttgttgttgttgttgttgttgttgtttttttactgagccagagtcttgctttatcgcctaggctggagtgcagtgtcgcagtctcggctcactgcaacctctacctcctgggttcaagcaattttgcctccacctccagagtagctgggactacaggcatgcgccaccgtgctctgctaattttcgtatttttagtagagacgaggttttgccatgttgcccaggctgtcttgatctcttgacctcaagtgatccaccctcctcggcctcccaaagttctgggattacaggcatgagctaccgcacctggccttcatatagtacatttgatcactattcatataaaattgtattattcatataaaaaggaaaaaataaactactgatttctaaaatgctttaagccatgttgaactttatttgagggaagaaaactgaaatttattacgtgatttcccccaaatttatatttgaatttccataaatccatttaattatttagaattttaatttgtaaaagtgttaaaaatttagtatgatatgcaaaaaagtaattcaagattttaaaataaatataactatgaaacatataaagttatgtgactgaaaataaaacatttttatttgcatgcagttcttttaataatacttttgataagaatactttaataataattaaaaagcatttttaattaaacctagtagtaagtttatagtaataaatgaattaagttattcttaaatctttaatgtcagaaaatattaagaaccatctgcagttggttaatattaaccataaataggcctgcataggatctgattacaatgaaccaactctccctgtcatggcaggatccatgtctaatatatctttttatactactccttccctgaggatctaggactatgcgttgcatgtagtaagcatttaataaatgtttgaaagaattattaccagttttatgcttcattaataaaatgacctctgggatagggaagtattttatatctttgcattagctgactttcactccagctgttttctaaattctgattactcctctctttctcgaaatcagtgcttatgaaattaaccaaggtaactaaacacatccaatatttgttctacagcaacaagctcttaaaaatgctgtgatatgccaagaagtaacacccataaacccatatcctttcctttttagcctttattgtctcttcatttgacaactttgtgatgctctccttaaagcaatgggagaatcttttatcattattattattattattattatgtattggccacataaagggagacttcctgaaatttaaaagacatatttcagagaatggaaacttaacatcactcaaaattaaaattaaaattaaaatctgatgcctctgtctttagatcaagagatcttaggctcatcaacatcccagaaatgggttttgtggttttttggctgaagtggtgcaagaaatgtgaatcactataaatctaaacttgctcgttggtgacatcaactttttaaaaagtgctttctgttggacttgttgagaattacatgatttccttttgtgatattaatctaattataagggacaaaaagttaacccacatcaatatactagattctgtgagtagaatgtccaagctttaagctactccttgttatttagaaacatttctagagttcctttatctcacccagcgctttgacctatacggcatctgatttcttctacctattgaaattcacgatgtaatcaatagcctcactaaatctaaggggtgctgtacccatagagctatatgtgtatgtaatatatgaatatgcttattggcttctttttgcatcctgccacaaattacagggagagttggaaacttcattaaaaagacatttgccaggctgctggaggaaaaggaaaatcctccataggctacctagctaatttccagccgatacaggattattcccaacaggaaacatgtattgctttactggcctaagtgatgatgttagcatctcttttggctgactgctttgcaatctagctgctttcagttgctagaaaagtcatcttaatatttatgtagagcttccacctcacatcagccaacgttgatctcacgatgtctcgtgggcaaagcttatccgctgctcattgaaaccccaaatgcatcacagttatataaacaaggtatttgtaaaagggttagacttgtccacatttttgtcagcccactaaaattttcacaatttcagctcattttgattgttcctctcaccaccaccttccccctgtacacacacataggagcctgcatcctatctcctacttccttacatactcacagtcattgtcccagcagatattaaacatgccgttttatgctgaagatataatataaggtgactgaattaatttatcttattgcttgctagaaatttgacatcctaacttcagctgtgacttgatatcaaaagaattttttaaattgtgaatatagagtcagttaacaggattctaagttgtttcttgaaagctgttttgcaaataaaatgataaaatcttgggaaagctttagtaagggtagtgtttgtcatgcaaaataaagtcacaaaaccaggacttgaaagttatagagatgaagaaaactgaaatctctaaatgtgagaaaacaacctatgttactgtatctgagtgtcctggttggctttctctatgtcatccactgattggaactgctttcagaaataactgttttaagcaaataaaatagaaaattacctatactctggtctttgtttgcatacagattcacctctcaaatgttttacataagtagtctacctagatattctagaactcaaaatctaatcaaatgatttcagttctatgaatgcaccagtagagaaaaagattatctgtggtgaaacaccattaattaaattttggatgatagtataattatttctggtgaattcctggcttatttctcttaaatacggctttcacatctgttacacacctaatggaaggcagaatttccaataatgctatactgaaggagctttcttccctttatggtgtatttgtaggaaatattcagaccatatggtttgtgacataacctccactcttacttccaatgtggaatttcatttccaggtactgtatttgacacctaacaaagagaatacccaaagcccagttataagatgaaatgtgctggccccttgtaggataacaataattttccataaagtcttgtcagttgggtgacagtatctgcaggacctaggagccaggacctgagttatttctgttctaaaaggttcaggagaatagcatttagaccggcactgctgctgcacctttaataaaagactttaataagaatattgggagaaataaaaagaatggaggatggcatatcagtgaaacactgaatttagtttaagagagtttacttttgcgacttgtttttctcacacatggaaaataacattttcttataggtgtaagggtatgagagttgtcaggctttcttgggggtgatcaaagtaatctgttctgttattgtgtgtgttaaaatatttattctttttgtcttcattttgtttcatttgtactgacattgtgacatgctctcccaatgaacaggtcgtcatggagatggaggttattggccagttgatactaatttgattgatagaagcaccctaaatggtaagtatataaattaggtaatattgaattagttatattaattaaatggttaattcaagagtgtctggggcaaattttctatcaactacaagtgccaggaaccttggatttagtgtcttagtgggataatagaaacatgaagttattaaaaaacaaaaacaaaaacaaaaaaaacaaaaaacttctagcacattctgccaggagatgatgccaataagagttgacaggtatgtaaaaaaggagtcagttagagaagcccagcatggagcactttgtaaatgacacaaagctgttaaataccaagatttttaaatgttacaatacatttaagatgtttgcaggaatctaattttatttgagagaggtgatatctaaggttggttaaattgaaacccacccagtttcatatattaaagttacttggatttttgcctgcagggtacatttaattcttcaaaatcctctaccatcttagggctaaattttctttgtgttgtctacattagacatttatttctgctcatcctagtggagcatgcccaaatatctgctggctttaaggatgaccagatggaggtactatctagagctacatagaaggacaaggttggtgtgggggctgcattccaggatcttatccttagttttgctgaaacaaactttaaaaggatggactaatactggccaaattttcaggggactaatgtatgtatgaggccatgttataagtttctttttcattattgctgttgtttggtttgacttactaaaaagaccttcagatattcaaaatgtgaagatgaacacttgtatacccatcagcaaggttaagatatgaaatatacagcatgggaattgaaatatcttgtatgtctgtgttttctcacatgcttcttaacactgttcctcactctgatataagtgctctaatttgatgtttactacgtatgtatacgtatccctaaacattatattgttttacagttttacaaatttatagaaatgatattgtatcctgctacaacttgctttcttttttaacgtagttttgaagatgtatccatgtgtttacaaatagctctcactcatttatcttggctgctgtacagtattctattttatgaaacaacaaaattaaccatttttgcaggttttcttaagaaacttgattactgaactgataaatttccatttgtttgatctccttttaaaaaatccagaaaggaagtcaaaattccaatctaaaaatagtttgctgcatgtgaaatagaatagtggtgtaaattaagtgattatttcttatcataggctgtgataatctaatgcagcaattttcccaagaggatatatatatatacagagtacaccaaatgcttgcatcaaagacttagggttatctctcctctggccaatggtagacttagaaatatattttcacctcttgacttatttttgaattgcctggcaataccttcctctgttattaatgcctttttcctaaccagcaacacgtagaacgtcttatgtttaaactttgagtccatttctgctgctattaaaaaataccccagatttggggtaacttataaacaacagaaatttattgctcacagttttggatgctaggaagtccaagatcaaggtgccagcagactgggagtctgctgagggctcattctctgcttcacagttgatgccttccagctgtgttctcccatggtgtttggaaagggtgagcaagctccctcaggctttttctaaaataagggcactaatcccgtttatgaggccaccactctcatgacctaattatctcccaaagcctccacctcttaatgcctccctaacagggattaggtttcaacataagaattttggaaggacacaagcattcagaccatagcaagcttcccaggatgctctttccaggctactcacaacttcctattgtctcttagactcctcattttccttcatttaaataacatgactgtccctggtaggtatttgactttcagacacttgttttaactaacaccttgctctggcagtccctaacatacccaacaggtagtttaggaagcacacagggctgggtgtggtggctcacgcctgtaatcccagcactttgggaggccgaggcgggcagatcacgaggtcaggaaatcgagaccatcctggctaacacggtgaaaccctgtctctactaaaaacacaaaaaattagccaggagtggtggcacgcacctgtagtcccaggtactcaggaggctgaggcaacaggagaatcacttgaacccaggaggcagaggttgcagtgagccgagatcacaccactacactacagcctgggcaacagagcaaggctccatctcaaaaaaaaaaaaaaaaaaaaaaaaaaaagctcacagaaggtgagaggagggacttgttgagacagaaaacagaccccaggccatgctccataaaatgggcataagtaacaataattccctcctcccaactttgcaatttcattagctcactctcgtgctccaaattttatcttaaatttcaacaataagccaaaaacattatatgtattcaagcagtcagtcaagaaatgcgactaagccctcagcgagtgcagggcacttgcaatgagctatgggcgcaaactgaaggacagaccactgcaggaccaatacaccaagagggttaattgcctgggtggacaaagcagaaatatacaccccaggaagatgaaagaggatgagaaaatccctagagatatatagcagggtaaaaaaaggaagttgctgaaattgggagaaacataattgttgtattttataccctgagatacagagcttctgactttggagttcatgcaggaaattagcattgtcccctttagaatcatccaacagagccaattttaagaagctatttctacaaggattttcacattgaaattcattcccagtcaagggaatactatctatactggtacgggacagtactttttgaagagacatactgccagaaaattaaagagggatttggtatggatgaatgagagagagaaattaacctataggtttcaaccactactgagcagtggttatgaggcttaaagcttgggcaaatgtaagccacagacacaaaactatgtactctcttaaactgcatgtccaaaaggactccagtattgggaagaattgccagatattgcaattaaaaatataaagaggccaagtaacatttaaattatttctgtgagtaatagataaagaaaaattataaaagggattgccatctcaatttatatatgcaccccaaggtatacatgaataggcaactagaaataattctaacctaattgggcctcctgtatttttaattgtgaaatctggaaatcccaatttcagattgaattcaaaagtttgttgttgactatttgaagttgctattcaaattaaaataaatttttggttgaaaagaaatcccagcccacatttgacatgagcatataagtcaacaatcactttccttttcaaaggtgtcagatgttagaagaagagaaagagaaatccacatcattgggttcatttttgttttaccatttaagattcctagtgagaaaactgaccaaaattaaatttgacctggtacacattatctcacaggagaaagtcgtgaagattaaatagaccgatgccattcagtagctttgaagcagtttagatgcgttattgacattacttcttcccaattttctgcatcacttaatgatgttttagggatttcatgctaaatgaatgagatgaataacgtatctgaaatatttctagattccctactggaataacaaattatttcaggctgtctggctgattaaggtgaactgataacttcagagagccagggatggtagaggccaaactttatctgcttcctattctattttgctagcaaataaatgatgataagtatataatataactttagccttggctattacaagcaaatcagcaaaggcatctgaaaacctcagatttctaattaaatttttgctaatgtcttaagctttaaaaggggggtatgttttccaagtagatgtgcaagtgaggcccctgagtaataaaactccaattgtacttcacccttataaagtgggctacatcaaaacatttaatgtctgagtttttaaaccttgtatacaataaaatttcatacgtctccccttagagtgacagaattatagaggtttcctagctccctctacacttgctggattcattcttcaaagcattgtaatagaataatggcttactgtcaggatactcaagccagttgcaaataaatttagaccttgctaatcatttactttctcttacagcgtgccactcttaaaaatgtactcttggaattcaaataaagaaaaaccaaactatagttcatgtttactcctgtagttggaagcccttaattaaatggtagaactgaaagaggcttcctaaattattttctgatggcaggtagaatcaaagctaatatgtggtgatgtagtagtatttttctttttttttttttttttttttttgagacggagtctcgctctgtcgcccaggctggagtgcagtggcgggatctcggctcactgcaagctccgcctcccgggttcacgccattctcctgcctcagcctcccaagtagctgggactacaggcgcccgccactacgcccggctaatttttttgtatttttagtagagacggggtttcaccgttttagccgggatggtctcgatctcttgacctcgtgatccgcccgcctcggcctcccaaagtgctgggattacaggcgtgagccaccgcgcccggccgtatttttcttttatgatgcattcaattttagattatggtccacattcttaatgcagaaaaattcttcaatatctggaaatgtgttttgtagtttatatttgtataaatgacggaactatgaaaattgcttcaacataatcctccctttctgattagagaagataaaatggcaatttccttttttctatagctctacctataatttgtaaaatcagtgtaacaagtttgattaaaagatctataaacctcataatagtattttattgacctcaacctttaaagataaagttaaacttgatgagttttaaaactttggtacatcaatgttaataaatagatcaacattattaatttttaaatactcagaatcatattaagtgctctataaaatttgtcagaaaagaagcagtttgctctctatttttgcaaacctgtttttttttttttagaattcaataacattttaaccaatgtaaataaagtatacataaaactctttccacacttctataaaatgatcattccaaggttggtaactattagaagacacccaatgctatactcagcagaaatcttaatgcaaaagaaaagatacagaaacaaaattttacagctttttttccagatgaaaagaaaagataactagagtaatctgaggtcctaggttctagttcagtgattacaagagactgctcacctatcatccacccattatctttatcccaaaggatttttaaaagtcctagtctaaacccagattctagacctgactttgtagagcttagagctgtgtgacaaatcaagtcacttaaactccggatctcaattttcatctggacctagaaactgttaagctagagcagcacttctgaacctcaccagcattaacatgtaagattggatttttctttgttgtgggcacatgtcctgttcaggatgtttagcagcatctctggcctttacccactggatgccagtaatatctcctctcctccatgttgtaacaatccaaaatgtctgtagacattgccaaatttcccccttggcagggagggaatcttcccagttggaaaccactgagctagattagcataccctgtaggttgctccaaggtacatgggtcctcttgagaagctctgagaaaataaataaataaagtgtcccattgtcagataagcatcaggaaagtggtatggcacctcactgcccttttgccaggcctttgtcttctgtttgaaaagtaggttttaaccttgacagtgcttctctgctcagtcttaacctcttgattttggtgatctcatcctttccatggatcggaattccatccatgtgccaactcccaaatgtatatcattaatgcagagagagatcaatgttctggctgtttctttaataattatcatgagatctccaccccgacgtattcaagactaaacttttgctcttccctctttgagccttccctttcaccctttccctcatctcaagacatgaggactactacttaggcttgaacctgagtctctcattctttcctcccccatatccaaccggtgttgtgctcatttactttcaaactgtattgtgtaactggccactttgcctgattgtaattgccactgtctcaggtcaagctatcatcatctctcatttggagaacttcaataacctcttagctgatctccatgcttccaccactgacccctctccacacaacagccagagtggtcttcttaaaacaaatcacgtctgtttctggcttgctgaaacccgttagagggtctgtgattgcatttaagataactgaatgtaatctacagactcagtaaaactgggtcctctttctctgtgtagcctcctcttatgccattatcccttttgctggctgtgttccaggcacatgggctgctctcagttctgtttaaaggaataggagctgatgcttagcaataactcatgcttcagcctgttgctttcataataagtcctttcatgagcccccaccaacagccatacattctcattgttatacctctctacatgaatctttctacttttctttttagcactagttataattgtaattttatacaggcatccttccttttattgtgcttcacattattgtgcttcacagatactgcagtttttccaaattgaaagcttgtgctaaccctgcattgtgcaagactattggcaacatttttctaacagcttgtgctcacttcatgtctctatgtgacattttggtaatttttctaatatttcaaacttttaaattattattatatctgctacgatggtctgtgatcagtgatctttgacattactattgtaattgctttggggcaccacaaactgcacccatataagatgatgatcttaaccgataaactgttgtgtgttccagctgccccaccaaccagcctgtctctctcccccttttggggcttctctattctctgagcacaacactgttgaaattaggcgaattaataaccctacaaggcttctaagtgtccgggtggaaggaagagtcacatgtctctcactttaaaattcaaaagctggaaatgattaggcttagtgatgaagacatgtcaaaagtcaagataggctgagagctagacctcttatgccaaaccaagatgtgaatacaaaggaaaagttcttgaaggaaattcaaagtgctattctagtgaacccatgaatgataagaaagcaaaacagccttattgctgacatgaagaaagtttttgtggtctggataaaagataaaaccagcgacaacattcccttcagtcaaagctttatccagagcaaggccctaagtctcttcaattctgtgaagatttatggaggtgagaagctgcagaagaagaattggaagctggcagaagttgattcatgtggtttaagaacagaagccgtctctataacagaaaagtgcaaagtgcaacagcaagtattgatatagaagctgcaggaagttatccagaagatctagctaagataattgatgaaggtggctgcactaaacaagagattttcaacacagacaaaagaaccgtatattggaagcagatgccatttaggactttcatagctagagacaggtcaatagttggcttcaaagtttcaaaggacaggctgactctctcatcagggtatagtgcagctggattttaagttgaaaccaatgcttatttactattctgaaaatcctagggcccttaagaattatgctaaatctactctgcctgtaccctataaatggtgcaacaaagtctggttaactacacacctgtttacagcatggtttactaaacattttaagcccactgtagagacctattgcttagacaaaaagattcatttcaaaatattactgcacattgacaatgctcgtagtcacccaagagctctgatggaaatgtacaagagattaatgctgttttcatgcctgctaacacaacatccattctgcagcccatggatcaatgagtcatgctttcaagtcttattatttaagaaagatatttcatagatatgtcttccagctgccataaagtgtgatttcctctgatggatctgagcaaagtaaattgaaaacgttttggaaaggattcaccactctagatgccattaagaacatttgtgattcatgggaaaaagtcaaaatattaacactaacagaagtttggaatagattccaataaggagtagattccaatccttacagatgattttgagaggctcacgacttcagtggaggaagtaagtgtgatcgaaatcccagtaactgcgatcgaaatagcaagagagccagaatgataagaggagccttgaagaagtgactgaactgctgcaatctcatgataaaattttaacagatgaggagttgtttcctatggaggagcaaagaaagtgattcattgagatgaaatctactgctagtgaagatgttgtgaatatttttgaagtgacaatgaaagattggtaatattacgtaaacttagttgataaagcagtggtagggtttgagaaaattgactccaattataaaagaatttctcctatgggtaaaatgctatcaaatacatcccatgctacagagaaatatttcttgaaaggaatgatcaattgatgcagcaaactttattgttttcttattttaagagattgccacaggctgggcatggtggcttatgcctataatcccagcattttgggaagccaagttgggcagaccatttgagatcaggagttcgagaccagcctgtccaacatggtgaaacaccatctatactgaaaatacgaaaaggaacctgaggcaagagaatctcttgaacccaggatgcggagattgcaatgagctgagatcacaccactgcacttcagcctgagtgacagaacgagagtctgtctcaagaaaagaaaagaaaaaagagagattgccacagccaccccacccttcagcaattcccaacctcatcactcagcagccatcaacataaaggcaaaagcctccatcagcaaaaggtctgtgactcgctgaaggttcagatgatgcttagcattttttagaaatgaagtatttttaaattaaggtgtgccatttttagatgtaatgctattgcacacttaatagactacagtatagtgtaaacttttatatgcactggaagaccaaaaaactagtgcaacttgctttattccagtgtgtggaaccaaaaccacagtatttctgcagtatgcctatatttatttccctcatgatttgttgaacatctacctttttttagtaaattgcaagttccatgaagtccataatcatgcttcttttggttacaacattgtatctccaacatctaactggatcttcaacacatatttatggaataattgaatctgttttctaccacccctgccccactcctcctggcaattaacaattcacatcagcatattaaaaatccaaatttttttaaaataaatatgttctgaaacttagttgtccaaggaactgtacccccataacgctgataaatatcttattttagggtacaatgggctaaattatctgtgagttgtcttccagctgattgattacagcatcttatttcagggggaaatactttgaaacgatcaaggccgtatgaactttggttcaaattcaaatgcttataaaattattaagacatatgtagagctcaaagtgttctaataattataaagccattatcagggtaaactgcaattgtaggagtgaagttaaatccccaactatacactttcattggacctctttccttcctcggaagtgaacttgtcattcttacattcacattgtttgcctattgatattgtgtagctattggggcacagccattacagccattgtgccaaggggaccaggtcctcaaagtaggagccagggctcttagagtcaatatctagctttcttttcaatgataattaagtactcagagctctggtctatcaatgagcttgctgcagagtgtttatgagagcaaaatatgataagaaatataaaacatttttgacagtctataaaatttttataaaaacaagttacttcaatgaaccaattttttaatatttaataagtctttattaaatatatgtatttgctttattaaatttagaaggaaaaggctgaaacattttatcatgttcaaacatcatggaaataaaaaataaatggaatgcccatgagatggtaaaaaatgtgacacccttattactaattttaatggaacacatctaggtcttgattactcaggcactggatacccacactattatgctaacagcagagacaggtatattatgatacaaggttttttttcctttaaactgggaacattacataggatataatacattgggtggacctggtcgttcatgcctgtaatcccagcactttgggaggctgaggtaggagggttgcttgaggccaggagtttgagaccagcctgggcaacataagaagaccctgtctctacaaaaaaaaaaaaaaaaaaaaaaaaaaaaaaaaacacttaaaaattttccagggatggtggcatgcacctctgtagtcctagctactagggaaactgagatgggagaattgcttgaggctaagagttcaaggctacagtgagctatgattgtgccactgcactccagcagtagtcacagagtgagaccctgtttctaaaaaaggaaaaaaacacattgagccacatcataatgtctaacgagtgccaactttgtgccagggcttgtggtcactgtggtgcaactattatctcatgaaatcatcacagtgccctataggatatttgcaagtctttgaatgactttatgcagcttccccactgaagctggaaagggggcaatgtcacttgccccttctggagccagcctgtctcccagatctcctaactacactaatctaggtttgagagctctaaaatttgtttctaatttgtagcagtcttttgatgtattaagatatagatcctcattacttgcagaatctgaatttgtgaatttacctgcatgctaaaatttatttgtaacccccaaatcaatactcacagtgctttcatggccattcatggatgtgtgcagagctgcaaaaattttgggttgcccagtgctcatgtcaccacctaagacagaaaaaaaggtactctctgtcttctcgtttcagcccccatactataagaaagtgccccttttttggtatgtttctgccaatttttccatttttttctttttgttggtgacttcactgtttaaaatggtccccaaatgtagtgctgaagtgctttctaggttcctaaacacaataagggtgtggtgtgacttacagagaaaatatgttctctctacaaattttgaaaagctttgctcaggcattagttatagtgctattggatgtttcagtattaatgaatcgacattatatattaaataagatgtctctaaacagaaacacacaaaaaacaaagtgtatattaattggttgataaaacagtgtgatcagaggctcacaggaagctaaccttgtgtttcctctagaagtaatcattcagtattcactaattagcatttgtggcaactttatagaacacaactcctgcaaataacaagaattgactgccactaaagacaccattgcacttgacttttttaattgcctgcttgatgtcaggtaatctgattattcagcctttgatttcagattgagtgattaatgaaagaccttgaatacaaaattttaaactggtgggaacttttatgaggaagtcataaaggcctgcagtcaaagatttgtaatgggagtcctcatgaaccccgactctcccaggcaaatgacatcaatataatctcactggtactcagcagaattcagagttattttttttgacttggaatatgatgtcttccagggtgaaaagaaagaaatagaagtagaaatttgagtaatttcagtttaccatgcttttaaaaatgttgacaaggtgtactgttatgtatgattcaagctaagtttgtcagaaacagtgaattgttaaatttaagtcatgcttataaaaatctatgagatccctaactatcttccttgtaagttctcacataaaaggttaatttattccaatctattaacttattaagtacaaaaagggcatattgaaatactactgtaaaataactttttaaataataagtaaaactgtgaaaaaagggagttttgacctttcattttttgcttcattcttttatggtaagtgtaaaaattacttcaaggaaatcctatttctttcatttgtaatcataattttttaacagaaagtgctgttatttaaaaacttttgatgagttttttcctccaagagtcaacttatagtagaagtacttctgtttccaataataatgaatgagctataatttatttaagttttgatgagtttttttttttttttttttttttacaaaagcaatgattcttaggcaacttgtcaaaagacgtcatttcagttttgaggcaagtactgggttattatattaaattgtgagaataggttaatttagctatcacaatgagtatttgtattaatacgttcttacaatgctaataaagacatagctgagactgggtaatttataaaggaaagaggtttaattgactcacagttcagcgtggcttgggatgcttcaggaaacatacagtcatggtggaagtggaagcaaacacatccttcctcacatggagaaggacagcaaggagaaatgctgagcaaaaggggggaaaggaccttataaaaccatcagaccttgttgtgagaattcactatcacaagaccagcatgcgggtaaacacccccatgattaaattagctcccactgggtcccttctgggacacatggggattatgggaactacaattcaagatgagatttaggtggggatgcagccaaatcacgtcagtattattcctaaaaatgtggtggctcacacctgcaatcccagcactttgggagactgaggctggcagatcacctgaagtaaggtgttcaagaccagcctggtcaacatggcaaaacccgtctctactaaaaatacaaaaattagtgtggtggcacatgcctgtaatcccagatacttgggaggctgaggcaagagaatcgcttgaacccagaaggcagaggttgtcgtgagccgagatcatgccagtgcactccagcatgggtgatagagcaagactctgtctcaaaaaaaaatcctttacagtctggaagttcacaccataagtcccaaatgctattgtagatattataaatttaggcaacattttattattgcgttagtcatgtaattttattataagcacttcctctgtatcaggtgctgagatggttgttttacatgtattttatctaattctgtcagtaactgcacacaataagtattacattctttatacagatggaggcactgaggtacagaaggtctaaatattttgctcaagatgtatagaaaattaatataggttattaaagaaaaataatcaaatttaggtataggaaaacatacaaattccttgcttttttatactttctaaattatttgtaaataatataacctaatgtttaatttttaagaaatgtgtaacttgtaatgacaaacatgactgacatagaacagagtattgctagttgatttatcattgactgagagcttaagaaagctacgtcaagggtcattagtcattcttatttagcaagtaactcatcacagatgtcttattattctgttattttccacctacatattttctgccacgaggtactgaggcaattcaggaaaacatttgtgttaggactttgtggcttttgaacccggtggctgcttttaggtgggattcatacacctttaacaggttgaaaattaaattgctttatagatggcatcttcaaaggaatggtggtaaattgtgagtgattggtatcaagcagtttgtcttttacagcatcaaatagtgtttcctcataaaccatagcctctctcgttcttgtcactcaggaattcttatggtacaaagtagcatctcttctcctctccgtaccttccactcagtaggaaagcttaatcttgtttttattgagatatatcttatgcgccataaactcaccctttgaaaatgtacaattcagcggtgttcagtgtattcataagcttgggctgccatcactgctatttagttccagaacattgtcatcattccaaaagtataccctgtatctgttagctatccctccccattcacccctctttccatccactggaaaacaccagtctactttctgtctctctagatttgcctattctggatatttcatataaatagaatcatataatatatgtccttttgtgtctggcttctctcacttagcacagtgtttccatagtttatccatattatagtaggtattagtgcttcatttctttttatgcctgggtaatattccatcatagggggatatatatatatatatatatatacacacacacacatacacacatacatatgcatacatacatacacacacacacacaccacacatttgtttattcatttatcagtccatagacatttagcttgtttccacttttggctattctgaacagtgctactatgaacgtttctctataaggttttttgtgcaggcataggttttcatttatattgtgtaaataggtgtttcctctcattttttcattgcttccctcgaactcccatcactacccctaagttcagaaaagcccagaacattaggaactttgtatatcccaagagagcttggtaaaacttctgccacatcttcctaaacctgaactccattttcctgtcttttcccagagccgccaattggacaaatgcaccccccgcatggcagtgtcactcctcagaagaacagcaacctgcttgtgatcattgtggtcaccgttggtgtcatcacagtgctggtagtggtcatcgtggctgtgatttgcacccgacgctcttcagcccagcagagaaagtaggtaacagctggttcccaagaggaaagaagtcattgtcttttggggttatatttttgatggtcctctttctgcgttctttcataattcaccccatgtccttacttcctaaccctggcaaaaccttgcgttttgtctattccaggcctatcattaagtgagtgagggctagactcgcagataagataactaacaaaatccatctgggacccacttatatttctgtttgcttttacttctctgaccccttctcattttcaagtgagcgcaggtgttccttaggtaacacctagagaatagactccaccatgcccctgtttctggccttccctgaaatcatgtacacgagatttgaggaatgtgtttctctgtgtgcacttatttaccactttttacaaggagccctgtaggcagttaatcaatacttattggagagatgactaaatatagaatgccagactctgtacagttacaatcctgttggtgcttagtttggaggcagtagttaagaaagaagagagagttctgagattcaaaatggtttattttctgtggttaattgtcagaaattaaaagtgttgagggctttaagaatattttcatattatgcagctttaggttctagcagatgcagagaatgatacatcaaagtacaaagtttaaaatggaaaagtgatttttattcagcctatatccttgcagcaacaccctgtaactggccagttagtctgtgtcagccagtgctgggagtcagcaataatctcacagccattctctgcctctttgactttctagtccttttaaaattcagcctgatgtgtctttttcagctacactctctcactgagttgactatcttaggctcttccatgagtttttggttctggttttaggtttttccattggcctcaggcatgacattacctctgaaagcctgaggtatgggttcataggtggctggtttgacaactgtgtactttacactttgctagaaaagattctccagcaaataatgttcccccttctgttgctaatagctcgctcttgctctctctctctctctctctctccatctctctctctctctgtctgtctttctttaagtcctgtaactctatttgtagatctctagtttaccttccagcactctgaagtgacatgtttagaaagagaacaggggaagatatacatactgaagaaaagtaacatggggtgtagatgcaggctttgtatttaatttatttctatggcaggacaaattttctaaccagctgatttatgagatttgactagtttgaagctggtgatagctggtgtgctgctccattgtgcctaagcaagaaacctgctagagtgagcttagctgggccagcctcatgtgtgagcattctgggaagtcataatcactcacagagcttccacagtgcagggctgttaataaggctctggaggggaaagtaactaattgagtaaggcattgaacaatctcttggtgctgtgttatcaggaaaggggttgtgaaatcacggaacagtggaacatcaaggcagcaggtctctgaagcagagttaagagggactcatgtaaaagaaggtggggaggcagtaccaaaatgacacctggcctaccatataactgctttcaagacactgaagcattcactaaactagccaaatgtaactaagctatctgtagtgggtttgtttttgatttgggttcccccccgccccgtgtcatttctgtgagaagaatgttcgagcattagattgacctgatgaactggattcctggatatattttgtttctccacagagagaacaccagtcttctcaatgtgcaaaagtgggatttggtgccatgttgagaaaatctccagtcatcttaaatcctaccctaagcactttggcaaaagcttcagggctttatttggaaaagggagactctgagccctgagtatgacttgtttttaaaaatagggacctaattaaagaataagtggttctattaatgactgaaaatccaagaacagttagttgtagagtcactttggtttttcctcactgcactctcaaagtcttttaatagttacttgtgttcacactttgtttcatatctttcttcagtagcagacccgttggcattcatttttcatccctttgtgtgcatattttcatagagaaaaagaaaatgtttccttcaagttatttctgaactatagtttagtggggtttgtttgtttgtttgtttgtttgtttgtttgtttgttttttgagatggagtctcactctattgcccaggctggagtgcagtggtgcaatctcagctcactgcaacctctgcctcccattttcatgccattctcctgcctcagcctcccgagtagctgggactacaggtgcccgccaccacgcccagctaatttcttgaatttttagtagagacagggtttcaccgtgttagccacgatggtcttgatctcctgacttcatgatctgcccgcctcagcctcccaaagtgctggaattacaggtgtgagccaccgcgcctggccccttatagtttagttttttgttatttgttccattgaggaccgctactcctctgcatcacaattgagcccttcagaacaaactggataatgcaggtgaaagcaaaatcaattccaatctgaaacagaaataagatcccctccaaagctcttagaaaattggactttaatgtaattaataagttgaagtagaaaacgcattcacgagcttcttcaatatctcttttggggttctagagaatataaatttttctttatgttttttttgggggacttgaattacatccaagtgaattgaaaaagttctatggactctcagtaatatcttattcaggttaagtgtctatgcatttaataaacctaacctttttataaaatcatacatatattcaacaattaggctatccagttgattcagactagtgggtaagatttcatttttattatataaaatagctaatgaaagtcagtacccaagttctagttctgggttctactgcttctatagtaaactaatcatatcacctaaatgaagacccttaatacttgggtggcagtttctttaaatataatgataatttgggctaaatgctttctatcattctctttagctttttttgttggtttttttgtccagagccaggtaacaatcttctacttttaaaacataaaaattcccaatggaatacttctaatttatagaatcacatggtagcattaagctttaaattactgcagttcttttcagttatttattaaacttttttactactgtactttgaagagaccccttccacagtttctattagtgagattatcgtatgacatctaatacagaaaaaattatattttatgaaaacttaaggctggacacacctgtaaccccagccttttgggaggccaagacatgaggatggcttgagaccaggagtttgagaccagcctgggccacatagtgagaccttatctctaaaaaattttaaatcagccagatatggtggtgcttacctgcagtcccagatactcaggaggctgaggttgggggatcacttaagcctgggatgtggaagctgcagtgagccatgattgcatcactgtactccggcctgggtgacagagtgaggcctgtctcaaaagagaaaaaaagaaacaaaacttaagttgatttttgtccctgtttctctgttttttaataaggcaataacattttctcgcccaacatatggaacacatgttattagttagactttatccacagatactaaggacaaaaatatatgaaattgagcaaatccaggagatctagaacgcatggttattacatttctaaggcagttacctgggtaggtgatctacagtcttgtctgaatgctttaaatttaaacatgtaaataaaacctaaggtgtacttgttagaaccactggctggctgggccttctatttgacttgacatgtggacagcaagttttaaagattagtatgcattcaaatcttgacaaaaataattatttttagtactgacgatgaaatgtctaggctcttaaatgaaatctacagtattttaactattataggtcacttttactgatttttcacttgttaacgttttaattggttttcaatattcacctcataagagatttgaactatcagctaccttaagacttcattatatcttaattccatctcagaattttttctgagatatatttgagtatctggaatttgacctgggtttctaatacaaatttttggttttgtttttatttttattccactaactgctattaatcaaaatggacaattaggggctagaagcctttggaaaagatttggaaagaaagcagagaaatgtttctacttatcaatatatctttttctgattaacttgtaattatttattcacactcacttcaagcttccttccttcctgaagacttcccccaaacccctggtgggtcagaatgttcctgcctcaatccctatcagatgttgggcatgtcttttaaccacgggaattagtacagcactctttatttgtctgcctaataaagttgggaacaactttagcagacgatgcctgagtccgtagtggaaatttaataatttattatgatgtgccaaaataacctatatggtaacagctgcattttagaacttcaatggacacagtcttgcataaaatggacactcaaccaatgttggtttttactcattcacatccccagcatactaattaaaagtgaaaaggaaaaaaaactccccttacagtaataggttatgcataaagtaaggaatgggtaaaccagtacagaaccagagaagaagctttcagataaatacttgcatgtcaataatggaaagtaattcttattatttaattcaagtaattattgtgtgctttatatgggatctgcatcatacaaagtaacaaatctgattaatattaactctcaagctaaaaatctttttgcaatttcccactgacttcttgatattattaaaaatgtatctatttgggccaaggcctcctatgtttttgtcccttctactttttcatgcacacaaactgtcatgccgcagtgcatgctcctcattccaacaatgcagaaattcccaggagccatgccatgttacaatcattttttaagctttcaatgcctccctgatctttacatttgtagtacttagcacatttcttgacacatagtcaatcatccataaatattgattgaataaataaataagtgttgtaaaacaatggatgatgttgaagaagtaaaggaaacagagtttgctccactttcactgaaggaactgaattatcacaaagggagcagctggacagctcaataagacacacggtgatcaatgccaaggtgagtggtacagagagagatgagggaaatgatttagattctctaagattacagtgacctgagatggtcaggaaggttccctgaaggagagagtcttgaaaggagacttaaagaataagtcatttgcaagttaggattttgaaggcactgtgggcagaaattaaataagtaaacaaacaaaacaaaaaatagagcaccagcacctgaccatgctgtcaaagttttgccatgatctgagaaggagaaaacagagagcctgggagggttctttgtttgcctttatcaagaatacctggggtagaaggagaccctcctattctagggctattttagaagcagaaggatgactggtgcctgagggaaaagatacatttggtatttgcagaggggccaaacatgaaatactctatgtcaaatagaaaaactagctttaaaatacaaacaaaaccaaataattcactatgatagtgcttcttaaattttagacagattcacctggagagtgttaaaagacagactgccccctgcaaccaagtttctgattcagtggttctgcagtggggcctgagaatgtgcatttctaacaagttcccaggcagtggcagtgctgatgcctctggtttagagaccccactttggcaaccactgtactaggagcacctgaatacacatttcgaagaatctaatggtgagacacaggaaccgtgggctgcaatgagcagcagtcgtgtcaagaaccaacagatgggcagaaggtcagggtgacacctgttcctataggttttaagacaaatttcagacaatttaattatgagcacatgttagttttattacaaacctgctgtggtagaggttggagggacaaaagaaggagaggctctccaaggccaaagatttctcctttaataagagatacgataggaaataaaagtggttagatggtcatggctagaataaatacaaaaaggaaataaagtctatttagagatctttagcttcttgactgacagtcagctgggtgggtgagcaacttcttagaacttgtcttgatctgattaaaatccagcagaaaaatgcctgttcattttatgaggaactacaatttcttccccagtggagattatgaatcacaacatacaaaaaggttctgccaggtttggaactcttttaaaaacagaagccatctggggctcgttggtactgaagtcatggaaactagcaaataaatgaataagtgaaaaggcatgcttgtaagcaaggggaaaccagaatttgtaatttattgctggtttcaattttatcttgactactttctttattccaggttatttaaatattgagttaaataaggagtttggctatgttttcctgaatttgggaactggtacttctctgtgtgcagccacacagatgctggtgttaagttatttagcattttgatcttctagaaagagagataacagggtgaaacatccaagtttgagaatgacattacattttctatgaagttaccaggagtagattacacagggagctgtgtgtgagttgcagatcagtttgccgtgggcaagtgaagtatatagaaatgaattcaggaaataaatggttatcagtgagttattatcttagacacatagacacttagaaaataggggttgtttcagaccattgttttaaaacattgtggggctgccaccaggaaatcagcaaagtgcaggtagtgttattttttctctgctaaaatacaaaatagatactaggtctgggattctttatctcctatcctcatcagcacgcttcaagaaagacaaaaaaaaggatgtcagggaaaattcaacaaattacaccaccaaatatttattaattacctagtatttacaaagctacttattcatcatcggaaaaccaaagccactccaatgactttgcacaggttacaggtgttttcactgagagtagcttgtatgaactattgagcagccatggaaggtagttattataataaactgttcactgcaaattaaggaagtgggaagtagatgcttctctagtctgctgtcaaaactagattttaacagtttgcattatttcttacaagagacattatttttaaagaaatagaagttacaagtagagatttaaaagttataaaactagggaaagggtcaaaaatgatttctgaaaaggaccaaataatacatggtttaggatttttgagccatatagtatctgtcacaactattcaattctgccattgcagtgcaaaaataaatgagcttggccatgttccaataaaactttatttacaaaactaggctgtgggcagatttggcttgcaaactgtagtttactgaccccctgctgtagagaatgactaacatgaacattgtgttacttcacttatcacacagggaacatttaatctcactagcctcaagaagagattatcaccccaaaaataaatttatagttgttaaagccttattgaggcaaataagaaacatgtgaaatacattttcaaactgtgttcttctcctttcaaaggatctgtctcactgtgtttgaatctggacactcagtgatgccaaggcaaaagtgttttattctcctaagaatatcctcatgtggccttttgtcttcaaataacaagtttcccagttgcacattaaattatacagctgaggtatagactttcttctaagacctcatcttagctattggcataaattctggccttttttatttctatttgccctttcaaagcaactccttcatttatctcctaaacagatgttgccatcaggtaccttatgcctggctccaaagattggcatatggttccatctaacccattttcaccttgcacatgaatctgcagccgctgaagctggagaaaggagctctctgccaggaagccgaggccctggggattcagcactgcatcctttataatgtggtgaagctccaggggggaagaggaaaggcagccaagacaagtctgccaattcctgggtttcacagggctcattctgcgagtccttttgtttcctttcctgcttctaacttgaattgactgatgaaagaaaggaagtgccattgaatagaggttctcacatttgccttctaactttgttccataggaaacgggccacccacagtgctggcaaaaggaagggcagccagaaggacctccgaccccctgatctttggatccatcatgaagaaatggagatgaaaaatattgaaaagccatctggcactgaccctgcaggaagggactctcccatccaaagttgccaagacctcacaccagtcagccacagccagtcagaaacccaactgggaagcaaaagcacctctcattcaggtaattatcttttcactggcattagggaaaacataccattctgaacccaagggagtttttcactccttttatggaaatgtcttccctactaatttgcatgtcattatgggtcatttatcaatagttaaatggatctaatataaatttggttgattaaccaattatatgtctttcttcatcctgtgacttgatataattttaataattcttttataattttgataattcttgaattttctatgaggttggaagtaggacagttgggaaatacagaaacttaaatcctaaatggattgactgctttttgttaattgttaaacaaatgttttgtcaaggcaataaaatttgaagccatctgtacattttccagttccttatttctatagataattgaaagttaattctaaatttactgtcaattccctgttttaaaaatcacatcagggcacttgaagtacaaaaaaactgaatattctgttactttggccttgattactatggaaatcaactgtcatccacatacagtcaccttatgtgatccccagactagtttgatgggattctgtctgaaaactatgttgttatacaaagggatctgaaaaaaaaaaaaaaaaaaagcctactgttcaatgaattggtgcagaacaatcactggtgtccagggataagtaagaacactagaaaataattgtaagatagttcactttctctgggtcttcatattatctaagtgcttatgggaatcatcaaccaaatactatcatcaaaaaatcccttcgtctactcataatgtgattatagaatgaggagctcctgtttttttttttttttttttttttttttttaagttttagggtacatgtgcacaatgtgcaggttagatatatacgtatacatgtgccatgctggtgcgctgcacccactaactcatcatctagcatgaggtatatctcccagtgctatccctcccccctccccccaccccacaacagtccccagagtgtgatgttccccttcctgtgtccatgtgttctcattgttcaattcccacctataagtgagaatatgtggtgtttggttttttgttcttgtcatagtttactgagaatgatgatttccagtttcatccatgtccctacaaaggacatgaactcatcatttttatggctgcatagtattccatggtgtatatgtgccacattttcttaatccagtttatcattgttggacatttgggttggttccaagtctttgctattgtgaataatgcctcaataaacatacgtgtgcatgtgtctttatagcagcacgatttatagtcctttgggtatatccccagtaatgggatgcctgggtcaaatggtatttctagttctagatccctgaggaatcgccacactgacttccacaatggttgaactagtttacagtcccaccaacagtgtaaaagtgttcctatttctccacatcctctccaggacctgttgtttcctgactttttaatgattgccattctaactggtgtgagatgatatctcattgtggttttgatttgcatttctctgatggccagtgatggtgaacattttttcatgtgttttttggctgcataaatgtcttcttttgagaagtgtctgttcatgtccttcgcccactttttgatggggttgtttgttattttcttgtaaatttgtttgcgttcattgtagattctggatattagccctttgtcagatgagtaggttgcaaaaattttctcccattttgtaggttgcctgttcactctgatggtagtttcttttgctgtgcagaagctctttagtttaattagatcccatttgtcaattttgtcttttgttgccattgcttttggtgttttagacctgaagtccttgcccatgcctatgtcctgaatggtaatgcctaggttttcttctagggtttttatggttttaggtctaacgtttaagtccttaatccaccttgaattgatttttgtataaggtgtaaggaagggatccagtttcagctttctacatatggctagccagttttcccagcaccatttattaaatagggaatcctttccccattgcttgtttttctcaggtttgtcaaagatcacatagttgtagatatgtggctttatttcctgtttttaaagtgaattatttgaatgtgttgctgttttactgtactctgtcatctcagaattgcataaacaagaaatacaagtattgactgtcaaccatggattgttgaatatttcttttcaagctctcaaatgatgtcttaggcagatttcctaacttccttgtcactccagttattgaaggacagtctagttccattaaaaactatcatctgaaatttaattaaagattctcctttctcatgctcagctagatatttggctctagggactgggggtcagaatttgttttctcaatcctccagtacattggagtgaaatggaacggtgggattgagaagaagctggaacaaagtctgtttcagaaacactgttacatcttttccccttctctccacttttcctgagcatgtgagagaagagggatggagtgaagagggaggggaggtgaggataaagagaagaaagtaccatttgaagttcttcatagcttttgtggacacgtgggctaacctctatgtggtatccaaattctgggtctcttatgaaacagaagtatgacttatttatggcaggggtactcaacccctggaccatggatcagtactggttcatggcctgttaggaactgggccacacagcaggaggtgagcaacgggcaaaagagcaaagcttcatatgtatttacagccattccctatcactcccattactgcctgagctctgcctcctgtcagaccagcagcagcactggattcttataggagcatgaaccctattgtgaagtgcacatgtgagggatctaggctgcacgctccttataagaatctaatgtctgataatctgtcactgtctcccatcacccccagatgggaccatctagttgcaggaaaacaagctcagggctcccactgcttctacattatggtgagttgtataattattccattatatattacaatgtaataataatagaaataaagtgcacaataaaggtaatatacttgaatcatcctgaaaccgtaccctgccccctgcccccaggtccatgaaaaaattttcttccatgaaactggtccgtggtgccaaaaaggttgggaatggctgctttgtggggccttgtagaccaggcccagttccatgatgggagacatgaagtccaggcttaccacctaacacagctcttcctcttccctcatgaggcctctgggaaattccagcaaggggactgaagcccagccaacttttcacatgcccacttggcccacaagaatctcctatatccttgccagacccaatggtgagagagcttgcactctaccactggccctctctcaaccttgctctcttcaattactttttcctctgcttagatagactcggggtagaacagcaagcccactgcctaaacaggctttcgcctggggagtgacagaaaacaaatcccttttgcaggaacctccatattttacaagtgattcttcttctagctttgttcttgactggatatcagggaggggagagcacctccacctcccactgaaagggatagaattgcctcactgccctaaggaggttttgccaatgacttctaagacacatccttctaaccttttcctttcgtcttttatatactgagatgacattaagttgatatctcttaataagtcctgggggaaggtttaatcccaaatgatgactgttttctttaaaataaaagagtacttatgcctacttgtcctcaatttgaggacctcgttgccaattttgtaacaaaaggaaagtaatcctcaaagtcctgcaagctatactttatgttaaattaagtattcttctctcctgcttaaaaaaacaaaattcaacataagtgaacagcattaccaagaaacattatatttaacaatggggttcctgagtaggcaataactatgtaaggagagattactgtatgttaaattctatgatttggacttttatacattattttgcctaatcttcacaaaatactttgaggtagatgctatcattcttttcatatagtaaatgaagtaaccaaattaagaagggttaaataatgtgcccagatttcagagctagtatcacagccaggaccaaaaaaatctgaccccaaattaatgttttgttgatccagtttcaattaactcatgtaatacttttatataagtacttttcttgttttgcgcccatgaaattagctttttggataaaaccagaaattagtttacagtattcatactttagctatggaaaagagaattgaatcaagcaattgctgcataaacaacaacaactaattttattgagagttaattttttattttactcattcttccctactgctggtatgcaaactgcttaaacaaaacctacttcattctctaaccacaaaaatagaggatgccactaaaatatctaggaattaagatgataagtcattgcttcatgatacatctcttctacatctagtggatttcaaaattattttctttacttaaaagtttacaatgaagaaacgaaagagttcaggtctatttgatctctaggacttacaaatagaatttagtttcttgaaatggatttatcctagtctaatttcactacagaagcaccacaggattatgttacttagcttcacttcggaagaatgaacaagtaaatttcagcatgtggcatttggtagtattcaatttctaaaaatgttcaattcagtgaataacatctataaaagagctacataacaccaaatgggcaatgtgatttaacacttaactttttattagttattttgaattatatacatgtctattaaatcctgtatttaaatttcccaacctcatttggaccaatggtaaataatgtcaggtggcaagtttatgagacaagccacaaagtgttactaccaaaaaattttatgcttcaaaaaaagtaaaaggaaaaaatcttgtttaacttttcaatgaattcatgtaatatcaagcacagtctatttttagaataaaaaaaaaaactgaaaacccacacacagacacccaacaatatcaaaggacttatttgaaaactatgttaccaccgggagctgtggctcacacctgtaatcccagcactttgggaggccgaggtgtgcggatcacctgaggttggcagcttgagatgagcctgaccaacatggagaaacccctctctagtaaaagtacaaaattagccagacgtggtggtacatgcctgtaatcccagctacttgggaggctgaagcaggagaattgcttgaaccttggaggcagaggttgcggtgagctgagatcacgccactgcactccagcctgggcgacaagagcaaaactcaatctcaaaaaaaaaaaaaaaaaaaaaagagaagaaaaaaagaaaaagaaaactggttggatctagagttacttttttggagtggcaagaagaagcacattagatagtgttttaatgtttgcttctactgtcaaacataattttgaaaactaaagaggaggaaagtctgttgtatttaattgatattttcactctttctgttgttcatttttcctgtttgattgtctgagattcctcttactacttcctgtttagagaaattccattagcttttttttttttgatggtttatctgcttgagacaaattctcttcattttccttcattggacaatgacttgatttcaccttcattcttgaagtatatttttgctggatattgttaacccaattctgtttggtagttctcttttagcacttgaaaaatgtgttggatacttctggccttcatgattcctgatgagaaatctgctgtcatttgaattgttttacccatataagttgtttacctctcactacttctaagatttttttgttgttcttgtctgtagttttaagaagctgaactgtgatgtgtctggtatggatttctttggttttatcctgttcggggattactgaatttcttgaaactataaggtttatttatgtcttttgccaaattttggaaatatcagccaataattctttaaatatttttcagtttcacaccctttttcctctttattgactctttggacactataatttttccccaaaattgatgcttttctattctttttatttatttatttatttatttatttacttgagatggagtctcactctgttgcccaggctggagtgtagtggcacaacctcagctcactgcaatctccgcctcccaggttcaaatgattctcttgcctcagcctcccaagtagctgggactacaggcatatgccaccactcccggctaattttttgtatttttagtagagacagggtttcaccatgttagccaggatggtctcgatctcctgacctcatgatccgcccacctcagcctcccaaagtgctgggattacaggcatgagccaccacgcccagccaaagcgatgcttttctaatgttgccactttatttcttttagtttattttgtttttagagatggggtctcactgttgaacagactggtctcaaaacatcctcctgcctcggcctccataacaggtgcaatcacaggcatgagctacacactcagtggttgccattttaaaacccacacacttttaaatgctctggtctcctaggaaacttttttagtatttttaccattagggtgcacttctttggtagatggttttaggtcagtcttgtgatccttatttccctcttctctcttctatacagactttccagatagctggcttttcacaaagactttgtggctgtagcttgagaaatagctttgctagaaagtattatttctctttgtacttacaggaaatttgaaatgtatcctcttttctgttttgtgattctgctgaaggagtaatatttgcatagttcatttttacttttattttttgagactgagtctctctctgtcacccaagctggagtgcagtggtgcaatctcagctcattgcaacctccgcctcctgggttcaagcgattcttctgcctcagcctcccaagtagctggaactacaggcagccaccaccacacccagctaatttttgtatttttagtggagatggagtttcaccattttggccaggctggtctcgaactcctgacctcaagtgatccgcccactttggcctcccaaagtgctgggattacaggcgtgagccaccacgcctggccaggtttgcgtagtttactgttttatatgattctgtgtagtttttgtaggatgtgtggacagagttagatttaggaagcttccatgacttcacctatgtggacttctcccagtataattttttattttaaattgtagtaattatgctgttaattttttaaaaaatgcatgcatatgataaaaaataaaaagaataaaaaagtttcaaaaaatagtaagtacccaaaatagtaaaacatatgtttgcctcttgcctatcccaaattcctaatccctttcgcaaaaggaaaacaatgttaaaaattttgtgtataaccttattacatagatataggtgtgtacttatatatatatatattcatatacacatagaaatgtgtgtcacaatatggttttatatgcatactacacaaatgggaacatacactattcagaacttcagtttttttaatacatattataattaacttttcaaatctgcatatatccattttttctaatttttagtgactctttagtatgatattttatggaatcctaataaatttatgtaaatatgtctgatcttatttttgaagaatgcagtttatttcttgtgggttttttgtaataaaatttaatatggttgggcttaaagtattagttgaatgaattctagtaaattaatatagtggaatattacatagctgttaaaaattatactgagttatgtattaacagagaaagatttttgtgttaccttttatagcaggttacaaaaagtatgcatgatataatgccatttttgaaaaatatattaatgtacgctctcccactttcacatgtataaacatatgcaaaaattataagcatcaaaatataaataatggtttattgtatgcaatgagtttagagtttatggttaatttcattaagatttgtacaatgaaatagattcaggtaacaagaaggtagatactatcatagaaagcatctgtaagactgaaaaggcattggaatgcctgctagaaattatgtaaagtgttgcatccttgaagagggcatgtttctcaggagtgtgtattttttaggtcaagacactgaggaagcagggagctctatgtccactctggagaggtcgctggctgcacgccgagccccccgggccaagctcatgattcccatggatgcccagtccaacaatcctggtgagtcaatattggtgccacaatgaagaaatgaaatgctttctgtatgtatcttttctataaaaaatcaaattatcaaaagtaattataattttccctgaactttctggacaaatggaaatgaggaatgactaaaaccgtatcattaataatttgaagtctaagtcttcattcgttactgtatttttttgtatacaatcagatggtctgttggcaaacagatggatatatatttaagaaattgtttgtaaaatatatgaattcacataaaagagctgatgtatattttaatattattgatcttattctaataatcatctccatagtttatttttatttatttatttatttatttatttatttattttatttatttatttatttattttatttatttatttatttattttgagacagaatcttgctgtgttgcccaggttggagtgcagtggcacaatcttggctcactgcaacttccacctcccaggttcaagcgattctcatgcctcagtcttccaagaagctgggactacaggcatgcaccaccatgcccagctaatttttctattattagtagagacagggttttaccatgttggccaggctggtctctagctcctgacctcatgtgatccgtcttcttcagcctcccaaagtgctgggaatataggcataagctactgcacccatcctccatagctttttaaataaactttttaatgagtctaattctcacacttaaataatctagctcctttaaagcagatgttgacagacacccacttactacacaccccttgttgaagttttctgtcatcctcccacattcactgaagatattattatctgagaatcacttcctttcccattacttctatgctcagtcttggtaattacagtattcatgcagataatccatctgataccctagatggttagttcctctatgttgcctgcaaagatattgattccttcccacctcaattcataaattccatgtcacaccaaatcaaaccagtacaaaatctcagttcctattaccttattagttccctgctcactttattgcccccttgccatcaattcttcaatcccaccaggacctccaatccattaactctgccatttcttcccatccctcatccccttcgtgtcctcatttatctgcaagcttaacttaggttttatagtcacttattatcttcagtctcatctcccttggtcttccttccccatcttactcgcctgaaaaaaacctggtaaaataagcagctccccaattcttaccccattccctcatagctaaatgtatctggagaaaaacatatagcctgcttactgaatatttatgaccaaaagtccaaggtgagctctcactatttggaaatgacactgtatttctctagtggttcatagttacactttataagatgaatgtcttatatgtattcttacttttcagatttcagtatctcccatctttccctattcttagctaataatcttatatcaggaagaaaagaaaagcattcagaaagtggtatccttgtccttccatcaaatctaattgatctgttagtgctgctctctgagtgtcttgttgaaatcccctctcacccatttagggactcttctgtaattactccttccctttcctgcatcatcagttttttttccttatttatcactgcagtaagcatacaaatattaatattctgtcataactcctgttttataacactcaatgccacttccccctccaattgaaaccatatttactgaaaaaaatttctaaattatctgcactttctcctctatctaagctttcttattagttttaataagatttttacagtcactctccactgaatccatgattgccaaggttgtcaataatctccacattgtcaaatccaatggtcaagtctcatactctcagaaacagttgacataggttctcacttatttccctgaaacactttctctttggcttgcaatgtactagatgcccctggttttcttcctacccttctggctgctcctcctcagtatccttcatttatttctcttcttcctcctgatctctaagagtcagagaatgccccagggctcagtcttcaggtatcctctcttttctccctacacctgcttcttagataatgtcatctagtatcaatggccttaaataaatattattaaaatgctgatgaatcctggaggacattatcctgaggcaggatctctagggcaagggcaaaatgccaccagtctttgctaaaacatagcaagagtctcctttgcttcatttcccaataatttcctcatcaccatctgaggacacctcagcctggacttcattgtccatatcactacaagcattttggtcaaaactgttcatcaagtctctaggcaattccaaactttcccacatcttcctgtcttcttctgagccctccaaattgttccagcttctgaccattacccagttccaaagtcacatccacattttcagattatctttatagcagtgccacactctttgtggtaccaatttactgtattagtccgttttcacactgctataaagatactacctcagactgggtaattcaaaaaacaaaggaggtttaaatgactgacagttctgcatggctgaggaggcctcatgaaactcagaatcatggcggaaggtgaaggaaaagcaagtaccttcttcacaagccagcaggaaagagagagagagagaaaaaacgaagggggaagagccccatataaaaccaccagatctcatgagaactcactcaccatcacgaggatcatggggggaactgccccaatgagccaatcacctcccactttgtccttctcttgacatgtggggattacaattcgagatgagatttgggtggggacacagagccaaattatataaatcaacttactctgttcagaaactctagtttcatgcctcttcattctgatttccttataccctaaattcagtcttttaccaaattattgttttcaaaacatttcccaaatttgaccactcttttccaccttcactgttttgcccttatccaagctaccatcatctcttacagattactagactacagcaataagcttgtaactagtctcttctttagctttttgaaaaacaaaaaaactattcgtattttttgtgggtacatagtaggtatatatatttatggggtacatgagatgttttgatacaagcatgcaatatgtaataatcacatcgtggagaatatggtatccatccacgcaagtgtttatccttcttgttaaaaacaatccaattatactcttagttatttttaaatgtacaattaagttattattgactacagtcaccctgttgtgctatcaaatagtaggtcttattcattctattttttgtacccattaatcttcattagcctttgcctttacagtcaattctctacacagctgtctctcaatatataaattagataatgttgttcctctgtgacttccatcacatgtagaaacaaaatccaccaattttactatgttctacaaggtcccatgtgatttagtctctgggtttatccctcactttatctcctattgctcctttctgtaattcattacaatcatgtaaccttcccctgtgttccttggataataggcatatctcagttcagggactctgcacttgctgtagtctttggaatctctttttgtagatatttacatgtcttatcccccatttctttcaggtctctattcaactaccacctttataagcaggtcttccctgaccattgcctaacacagcatctctggtcactctctacttctctattatgcttcatttttcttttttaatgcattacactattctatttgtggttttgtgtttgttatttatttgcttcctgtattttaatataatctttataggggcaaggattatgcctattttggtcattttgagtccccaatacccagaacagcacctggcacatggtaggcatgcactcaataccatttagtcaaatgaaagaattaatagttgtttatttttacttaccatatgccacatcctccctatgctccattacatcttctctcaattttactataataagtgcaaaaacttacatagcatttataatgaatgccagctgttcaagtcatgtagtaagcactattgttatgcgtctcattgttaggttctctcatttactagagagagaagaaaggattggagagtttaagtaactagctagcagtcacacagctagtacgtgctatagccagaatttggactcaaaaggtctgatttcagagttcagtgttcttaatcattatgctcctagctgtcataccctgtgaagctattgtcctttatcttttatacctttcactactgagaaagatactgtgcacttagttgccttttttcccctctagttgcactcctcttgtattaataactaagttctatctgtgccaatcatttattgctttcttctcaaacattattgtactttagaatctgtggagccttcctgtcccatctaattagaaatatcttcctcatctaataaattcccatatgccattgctttttctttcacagtatctttgaatccctggctatcctcccattctcaactcttttatgtcttctttgtgacttcacatctaaactgccaagacagcttcctagctaagtcttcccggctctagcatcttccagactcttaggcatcctgcttgccagatttcttcctaaaacaagttaaacatggcatcccaccccatacatttctccagtggctcccatttgtctgccaagaaaaacaaaacaaaccaaacaaatttttaaaaacgtttttagcatatcatattggaatctagatttctgttactctatccttatatgtacccagactcatgctaaggtagactcattgctgatccacaaatatgcactgtccttcatttgttttttccctttacatatttctttccttttgaaatgactcagtggatagctcaacctaagaagttttatgtatcctccaaagaccagagtagatattgatgctcttacaaatgcttttctgattactccatctagaaataatgactcccttttatatgtttgaataacatgttcttgtagcacgatatagcatttattacacacaatactgccttatatgcttaggctttcaagtacaaatcttccctcctccaacagcttgtgaattacttcatgataaggatgtaatgtatctaattcatcttcatattcacacattttattgtttaatacctagcacaaaattggtgcttgctaaatatctgtcgaatgaaaaaacaaataaatgtattattaaaatgccttccttatgtttgtaacacatcaatgtttggagagctctttttttgtcagttataaatagaatgtcatctaacaaaattgtctgatgtattaagagcagttaaacttgttttcattaaacagaaaaggaaataagaggcttagaaagagaaagaaaatctaacaagtatgaaaatgtttaatattattcacttggtaaataccttgctaattattattttcatttaatcctcacaatattatcatgtggtaagattatcctgattttacacatgggaaacagcgactcagacagcttaagcaacttcctctaggctacctgggcaacttcagaacctctacggtatactgcttttccaaagataaatatggcttttatctcctaaattattcatatccttttatttttcaaaaagattttctgaaggtgctatctccattgtctaaacatggaagctgaggctctgagagtctgaacttgaaacccctgcttgatccatctactctactatattgcttcatactgttatcttgagctctgagtttttgtaggcctaaaataacaaatcttctcttagtgacttattctacatgaatggaacccataaaattaccagaaattaatttttgttatttttgtaattatcagataacaacacatacatggttttaaaccatcacatagttttccaaaatttataagaatattctgattcagcaattccattcctagatatattctactcttggatatgtacccaatggaaatatataaaatattagtcaacaggtgcatataagaatgtgggttatttgtaatatcacatcttcattacaatagatgaatatagtatattcatatagtggagtacaatgcagcaataaaaataaactaaaattatacaaaacaatatggataatctcatgggtgtaaatttgcaataaagaaacctgatgcatctatataattcaatttatgtaaaattagaaaatcagtaaaataatccatggggtttaatatggtttggctgtgtccccacccaaatctcatcttgaattcccatgtcttgtgggagggtcccaatgggaggtaattgaatcaggggcaggtctttcctgtgctattcttgtgatagttaataagtctcacaagatttgatggttttaaaaatgggagtctccctgcacaagctctcttctcttctctgctgccatgtgagacgtgcctttcaccttctgccatgattgtaaggtctccccagccacatggaactgtaagtccaataaacgtcttttgtaaattgctcaatcacaggtatgtctttatcagcagcgtgaaaatggactaatatagtaatttgttccgggagtggggcattgctgttaagatactcaaaaatgtggaagtgactttggagctcagtaagaggcagaggttggaatagtttggtggaggactcagaagaaaacaggaaaatgtgggaaagtttggaacttcctagagacttgttgaatggctttggccaaaatgctgataatgatacagacaatgaaatacagtctgaggtggtctcagatggagatgaggaacttgttgggaactggagcaaaggtgactttggttatgttttagcaaagagactgggggcattttgcccctgccctagagatttgtggaactgaacttgagagagatgatttagagtatctgacagaagaaatttctaagcaataaagcattcaagatgtgacttggatgctgttaaaggcattcagttttacaagggaagcagagaataaaaattcagaaaatttgccccctgacaatacaatagaaaagaaaatcccattttctgagaagaaattgaagctggctgcagaaatttgcataatcaatgaggagctgactgttaatccacaatataataggggaaatgtttccagggcatgtcagaagtcttcacagcagcccctcacatcatggccctggaggccttggaggaaaaagtggttccatggaccaggcccagggtctgtgagctgcgtgcagcctatggacttggtgccctgtgtcccagctgctccagctgtggctgaaaggagccaaaatagagctcaggtcttggcttcagagggtgtaaccctcaagtcttggcagcttccttgtggtgttgagccttccagtgcacagaagtcaagaactggggtttgggaacctctgcctggatttcagaggatatatggaaatgcctggatgtccaggcagaagtttgctgcaggggtggggctctcatgtagaacctctgctagggcagtgcagaagggagatatggggtcagagcccccacacagagtccctactgggtcaccatctagtggagctgtgagaagaaggccaccatcctccagactctgtaatggtagatccactgacagcttgcactgtgcacctggaagagctgcagacactcaatgccagctcatgaaagcagctagaagggaggatgtaccctgcagagccacagggacggagatgcccaagaccatgggaacccacctcttgcatcagtgtgacctgaatgtgagacatggaatcagaggagatcattttggagctttaagatttgactgccctactgaatttcagacttgcatggcgcctgtagcccctttgttttggttaatttatcccatttggaacggctgtatttaccaaatgcctgtaaccccattttatataggaagtaactaacttgcttttgattttacaggctgataggtggaaaggacttgccttgtctcagatgagatgtcgggctgtggacttttgagttaatgctgaaatgagttaagactttgggggaccattggaaaggcatgattagtttttaaatgtgagaacattagaattgagaggggccaggggcagaattatatggtttggctgtgtccccacccaaatctcatcttgaattcccatgtgttgtggcagggacctggtgagaggtaattgaatttcggagccaggtttttcccatgctgttctcatgatagtgaataagtctgacaagatctgatgattttaaaaatgagagtctccttgcacaagccctcttctcttttctgctgccatgtgagatgtgccttttcccttctgccatgattgtgaggccttcccagccatgtggaaatgtaagtccagtaaacctcttatttatttattttttttgtaaattgtgcagtcttgggtatgtctttatcaggatcatgaaaacagactaatacagggttagaattcaggaggacaattacttttgatggaagtcgattagtggaccagaaggtactatagggcacattctcataatgtgttatttcttgttctggattacagatgccaggcatttcactttggaaaaacattgagcactgtatttagcatattctcaattttccctgtgtatattataattcaatgagaaaaaagacaatagaatatgtatatttttaaataacttggtcacatcacattcattgttatctacaagctgtttgttggtgaaactgtattcaacaaaagaaaattattttaacatataaacacagttaattttaaaatattttttattttttgagtcagactctcactctgttgcccagctgcagtgcagtggtatgatccctgttcactgtaacctccacctcacgggctcaagcaatcttcctgcctcagccccctgagtatatggaactacagacataagccaacatgcccagctagtttttgtattttttgaagagacgaggtttcaccacgttgcccaggctggtctcaaactcctgggctcaagtgatcctcctgcctctgcctcccaaagtgttgggagtacaggtatgagccactgtgcctggcccaaataaattcttaaactttttgataaaatagccctttgcatctgagatgattgataaggccataggtaactatgtttaaaaattttgtatctgtatcttggcagagttatgattttattcaggagagtagataaatttataatggccccatttgcaattatttacacttactggggtatcaagccttgtataaactaaagccatagcattgttcagatttctagtcacatatataaagatcgttgctatttcattgaggaatcattattcctataagattgttattttctttcttccttgacatttcttattatgtgctataaaatgttaacagataaaacataagttatctgaagttgtattttggctcttaaaactcacagagaaaatgtatttaatttcatgggaaggcagaatcttcttatttgtctaatattatactttttggttgaaaatattatatggcatatgctactccttatccccaagcattcttcacagtaaaattagctgaggctcatgaaaaacatgccagctgacagcacaggcaggagatgaaccccaatcttttgattccccagcctagttacccttaccataaaatggtggcaaaggttgactatttgtataatggccaaaaattattttaaatgctgtttcttactataatgaaattaattacaaaaaagtcagaacagagactggaagataggagatttattggcttaagtgctttctggaataacaccagtgagggtgaaggatacagaataacaccagtgagggtgaaggatacagaattggggcaagggtgggattgaactggtgatgctgtttaatggagacctcagctgacctgaggctgtcctttagggttgtcctaaatgaagcaagtggggctggccttctctatcctgactcaagtaatctttcatgcaggctatttccaagaagtggggtgtggccttgggtgagcgacttaatttggatgagagcattccttgaagaaagatttagatctacattacatttctagatggtattgcacaatcggatgtaactatttggccattttcaacccattttcttcttttgtaagatgccgaaaaggaagaggggaataggaactaggaaggatatagattgaagcagattagctgtaagatcatttaaagtatgagaggtttttgggcagtatcttgaattttatatatttgtcacttacctttctctgtaaatatttgagggaaaaaaaggaaatcattctttaaaggaaaaagaagtctcaaaaaggtagcctgaaacatctagcaaaaacactgaagcaaaggaagttatacactttgccatggtaatggctactggtttctgggctttctagaacattcactatgagagccaatgctctccttccctttcccaccatctgcattagtcacttggctgtagaacacaaacagtgacttggagaagctgttgagaagtgaaataaagctacatgagaaagggcagatttttaaaactggagttctattgactctaggtgctgtcctaccaggaggcctgcttctacacaaatggacattgagagggactcgtctgtgagacgatcatccctttgactcatgcatataaggtgcgagaaaccagcatcctaagattggtcccagctcaatagtcttctgagactgggcatttattccatcacccttcagcccttgtggatgcccacaaccaaccaagaattctttcctaggagtaaggagtgcatagagccgttctagtatgataaatatcaacagcacacccattttcaactattcagaactgtaggaacggtggtgagaaaaaagttcaaagcacacttaaatttgcattagaaatgatctcattacctaatacatgattttaaatactaatctgatcaattcattatcaatatcagtttttattctttgagtcttcgatgacatacttcattccacctcttactctgaattactgaaaggaacagtattttttattcaaactctataggcacacaattcattatgcattatgcaatgttttgtgcgatgccatggctctgtataaaaatggaattaaaaagttgttaatgaatgggaactggagacctagatgtcgtttcttggtagctctataagcaaataaattttcaaacaaaattaatctattgttaattctattggactaagaaaatcagcaagtcagtagagttatgcagacacagtcagagcttaaaaaggttcctgtagagagtacagaattgtatcttttgggaggattttacaagataagaagtagtttgtttttcaaagatatagaagtaatgaagaagggatctgacaaagggttggtgaaagtaaatattttagatgatggagtataaaaagtataccaacttagcttctagaaagagtttctattgcaatgtaaaaatacagatatccttcaagacttagattacctaattatttcttaattcctaatatcttagagatttcttcaacaaaatggaccatttcttaaacctcacaacatttcctatctcacacaaggttttggagatctgggggtaacttatgaatgactaaggcaaatggattcacaatttgttgtggaaatctttctggtctgcttagaaaagaatactgtgataccttaagctcatttcaaaggaattccatggaaccagatcagagtctatatctttcctatggcctcatcttctgtctaatatcatggagccaaaatgtacacctggatgttcacaactatttcatatatctgggcttcatagacacatctcatttgagaagatctcagctgaaaaggtccagatagaggagtaaaggtccagatagaaggagtatagtaggagattgcaggggtcttaaagtttccttctcacagttcaccctatttgatcttaacacatagctcctgctgtggcaagcactaagccagccagtccacattctgtctcatcttggaaagcgtgtataaaccacattaaaattgggccagatagacttcaataaatgccttccttcagcttataaatgacaaaacaagaacttgaactagaaattatctttctcatgtcaaaaatctttcagggtcatacttccctcaggttcaaatttgaatttaaaaactattatttattttcctctatcttaatgcatagcactctttttttcaaatgtaagacaggatgttttaaacaatattttcaattaaaaaagatattcaatgcagttttggatggatctgttgcagccttgcaaattaattacaatgcccaacatttatggggtgctgacttctgaccctgtactctgttgcacttctctgtggatgatctcttaaatcctcacaaccacatcataaaatcggtactccattgtgcagatgaggaaactgaaaaacagagcgtgaataatttgctcttcaacgtgtagctattatcatgtaacaaattactcccaaaatgtagcaacataaaataattattgtttattttctcaatagtatctgagaatcaggtatctaagagcagtttagctaggtggttcagggtcagagcttcaagttgtttcatgaggtttctttcagtgtcttgagctgagggtctagtttctcgctacatgggcgtatgcacaggtctgccagcctgtccttaagacataacacctggattccccaagacatgacacctggctttccccagcatgagtgatctaaaatagagaagagaggagagagagagaaaaacagagtgagcatgtacaatctttttaaaccttatcttagaagagacataccatcatttctgccacattctactgctcaccagaccaatcctggtaaaatgtgcaagggaacccaacaggcatgtgaactccatgaagtgggatcagtgggaggcatctttgacgctggctatgatgcttattcactagcaaggagtagaactaggtaacgaatccaggcagttttacttcagcacttaggactctttaccattatattaagaataactgcaaagcacatatttatgaatcttagggcttttccaaaagcgaccctctatggagtttgtggatacttgtgaatgtcattctgtggcacttgcttatcaaagaacacctgaaaatgtgaaggagatatgaatatcaaggacaatagaggctaaatttccaaatgtcccagataatatacaggtcattgtggaaaagagaagataaaaagaggcagaatgaaaaatcatttcagttaagctctttcatttcgacataccattatctttgtctccttcgtctcctcaacaaatctctcaattctgtcaagtaccatgttgagaaatatctagggagggttttattatttcttaaacattgtagcttaaaaaaatctttacttttgatttcctataggtagtatttagtgctaacattttagaatattatggaagttttcaaataccaatgtgccttgttcagggagctaagtaatttggtgagggaatttctacttgaaaaattttgtgcatcaatgtcagagataaattcaattgtcagaaagctgtgtcagaacagatttcttgtcatattttgccgcagagcagagatttattgaaaatgcttgatgatatcgctctctgagctgttttacataaacatagcagtggagtgaatgctttgagttgaagcatttgtgtgtttgtgtgtatgtgtgtgtttgtgtgtgtgtgtatttccgactttcaaaactgacgtcaaggggaaaaataccaaaagatatcctaatacctaatgttttatccaacttactttaagaatgattattttttgttataagtaaatgtagacttctgtgccttttcagaaatgaatcatagaataaaatacttcaagatcgaagctttgggatactggctattctatctgatgtcacaaaataatgaacacttttgagatgcagaaacatacaacagatttattatttttgaaagaaggtttattatttgtaaaccctttgtaatcaggtcagcagcaaaaatacaaaactattagaaagtaaaatttctttcttcagtaatgaaagacttggaactgcagtgtaagttcagtctctagagtgctctcagcactctaactaaaagattatatggcttgcaaaattgttttatgtttctctctccaaatttgtttggctccaaatcagaagatacgtatgaaactctttttctaaacgtactgtgaaacatttgttaataatattattgcttgtattataatatactcattttgataataaaatatagtatgcacagtttgtggaatgagtattttctatatttaaaggagactaacattgtaaaaagtaaaaagtatcaatactgggaatgttttgcaatctagcaatccactttaatgactgcagtgatccatttgatcagtaagacaggtgaaataattcagttgactgcctcagagtctgggaatttgagttgtttaaaaatagactttatgctctggtatggcttatatttacaaatgtgttcaactacattattattatcattattattatattaactatataccccaggagagtaaatcatatatcaagtcactctaaaagtctccagtgtgttaaaatgacagatttctaaataatactcctagaaaatccttcatattaaactcacttgaaaaatatgaagtatctctagcactgtcctagaaaagacacaaagacaacaaaattataacttatttctttaaggaatttataacattttggctggtatctggtttgaatctctgattctttttaaaagtttccttgtcattttttaaatttccctttttctggagtctgtttacgtgtttatatatccataatgtgcttttcataaaatatctttattgaggcattgtgctttgtactaattactctcaaatgttcattcatgtcttctctaaaataatttagaaaaactatgtatcccctcatatatttaaaatttgacacttaaaatattttgttacacattaaatacctgtgaaagatggaatttttctgatgtaacatgcttttaaaccaatctaaaagcacaaaaataccatagtagtttgatatcaacatcatccccttaaaaaatatgtgaggaagtgccttgttaacagatagaagttaacaccactcatttttctccttgaactggaatctacaatttattttccccacagattaacatacaaacatgatctatttttatgtttgtgggtctttttttgattatatatctatcttatttttttgcagcataaaatttatataaaccaaaattttattttatgtttgtatttccagtgactatgagtctttgttaattttctttcctatggatcttgttaacattacaattagtgtttctccacaatggcatatagcgtaaaattttattggagtgttatcacttaatgacatgaatggggctttttgtacattaattgcatacatccatgtatgaatgttgcttattgcattaattctattccagtgtgcttgttgttgatctaaacactgtgaaacctttgcctatgtttgcatagatagatagatagatagatagatagatagatagatagatagatagatagatatagtgtgtgtgtatatatatatgaatgagtactataacaatgagatctttatagcaatcactgaacaatttgaacttctcccaaattacatgccaaaatcacattgtgacttcttattctgttatttttgataatttttcaactaacaactacctgagattttccttcaattatgctctaaatgaaaatgttagaaaccacctgacttgcagaagtatttgttactcattcaagttatttactttcttgttttctaggaggttcacaataaaaagctgtaccaaaatttatcagcaattttaaaataaacttgaaaattgctttcaccgagaggcactttttgtaacaatatataaagacaagattaggttgccttttcttttggtgattatttcctttgctgtgcagaagctttttagtctggtgcagtttcatttatttatttttgattttgaagccaagcttttggtgtgaaacctaaaaagatcataaacaagaccaaaatcaaggagcttttcccctatgctctctcctaggaattaacttctgggtcttacatgtaggtattttatccattttgtgttaatttttctgtatggtgtgagataagggtccaatttcattattttcaatgtgaaaatcattcccccagcaccatttatggaagagactatacctttttaacataatttctaatcaggaagtgcagtgcctccaactttgtttttctttctcagtattgctttggttattcaatatttgttatggtttcatagaaattttaagatttttttctatctctgtgaagaatgccattagaattttgatggggattgtgttaaatctgcatattgctttgggtagtatgaacctttcaacaatcccatttatatgtgaaatatatgtgtgaaataatacatatataagctcaaatacacagagatagagaatgaaacagtggttcccacaggtgggagggggagaggaaatggggagatgtaggccaaagaatgcaaaatagcagacatgtgagatgaacaagtctagagacctaacctacagcatgagaactaaagttaatacaattgtattgtattagggatttttgttaaataagtacattttagctactatgttactttgtcacaaaaagtaactgtgagccgatagatatgttaatctacttcactatggtaaccaacctactatctacatgtatctatatgtgtctcaaaatatgtcataaacctctaatatacacaataacatgtatttttaaaaaaattctattaatgtcatcactcctctacactccaaagcaagaatttgtgatagaacaaaaacccaataaaacccaacaattttttactgaaaaataaagacaagattaggaaaattgaaatatcacttagatcttcactaaagcaatttttgttgaaatgatttatctttaaatgatttatatttttattcaatttataggaaatactaatcatttaatctgattagcagagtcactcttcattttcaaaccagtccatcaaaatgctttatctgaaacagtctgacttcatttttcagtttaagtaaacatgttcaaatgcattttaagaaacgttataaatatactgaaaaataaattctggtatataatttcaatagctagtttactagaagcagcccttttaaaatcttttatcttttatatatttaatctgaattttcagttagaatttaaaagaaatctatatgttgcttctcattgagttacaatatgcagtgtaatttgtatctacaattataatgttataaaatgaggaatatgacaaaagaaaagattttcatttggtaaatgtgcatgcatgtatgtgtatgttgaactccagttattggcattaccatctaaataaataaaaataaattattaatttcatagacaggaatatactgctaaaactgatcattcaggtagctgacttaaattttgctttggcataataaaagatagggaatgctaaacattttataagaaaatataagataaagattgactacaattggaatatttaatatatattataattgaatagctattgaataatgaaattgaacaatactatctaaacctagaagatattttgtatgttttttatctgtgggtttcagccactgtaactaaaaaaagttgatattcctgaaaaacattcagttacacttaatatgtcactcacctgcactgatttgggtatttgaagatattttctatttaaagataaatcctaagtatgactattgagaaaacactttgcttctctctctctcgactgtccctcaagagcaatacattcttttacagaattaatggaaaattcccaacattttttcaacccactctacacaatatatttgatttgtgaacaacctaacctttctaatgccatagttcatccttaaaagaaagactaagaccaagacaaacaaacaacatgaccgacataaaatgttaaggtggatttatggtaacttgattaactgtttctttgtttggagccctggaatgttttaaactgcagggtaatatttcgtagtatgatgcttgagggatgagctgtcttttctaaagtaaaaagtgggattggtggagagaggtaagtaagggaacctagttgatactatgaagagtgtgtatagatttgaggatctgaaaattccaccgttttcttttttgcttgttgagtgaatacataaggttcaaaaaacccattaacctttttcttttgcagctgtcgtgagcgccatcccggtgccaacgctagaaagtgcccagtacccaggaatcctcccgtctcccacctgtggatatccccacccgcagttcactctccggcctgtgccattcccaacactctcagtggaccgaggtttcggagcaggaagaagtcagtgtaatgcattttcctctctttttaataagcacaaatgaataatagcaaaggtgtcttgtaaaatatgttgcattctgaccttatcccttagaaaagttgatttccctatgactgtggtactagaatgttcctttccaacacagtgctttggatcctagctcatgtgcatttgtactgattccctaggcacctttccacagcacactccactgacaatacaaggggaagtggtggggaaacaaatgtcaagtggttccatcaaacaatgatgtgatgggtacttgaaattaatatgtcctattaaataggaaattaataatcaagtgatatcttccaacatatttggtatctgttggttatgtctcactgattgctgatgaaccaataacttgggtgaatgctttagatttctttaatcaggtaagtgatactttttcagctttaaaaattaattatcagaaaaaaaggatttccagggtattatttcatttctttgaaggaaggtaggaatgaaaagagactctcaagctattatatacaccctggtgatttctgctgtgccatttgactctttttttttttttttttttgagcacagtgttttaaaatctattttatggttttcatctcttagaacaggtgactcagcagctcatgtgagataggatgttttgtaatagatatgatagtaacaacaataaaatatatttttgaggtaaggtatatttttctaaccaaacagggacagctctaagaaatcataaatcgtctagatacagcaaggttagaattaaaaggcatcaaagatctgccaagggagaattagatttattttctcttttctcactgcacataatatctacagaatagagttgtgtgcaaaaactcgaggaaaaatagttgcccaaactgcattgaagggaattaaataggaaagatgtagaaagtctaataaccaaaattttcaaatcccaagacaactggaaatggaattccaatcaaagaattgagagcccacaagtgccttcttcacttctaaaatgaagctctctgcaacaaaaaaaaagacaagttttaatgttagtttagtattcggtctattggtttgttgtctcctacactcttttgatttcttgtatattctctgactttaaagggaaacatgaaaagaatgtgtagactttcagaggctgaggtgggcagatcacttgaggtcaggatttggagacaagcctggccaatatggtgaaaccctgtctcttctaaattagttgggtgtggtggcgcatgcctatagtcccagctatttgggaggctgaggcatgagaatcttttaagcctgagaggtggagattgcattgagctgagagtgtgacactgcaatccagcctgggtgatggagctagactctatttatttcaaattaaaaaaaaagaatgtgtagaatgacctttatcgggtttctccatcatgactggtacaagccaaaattcaggacttttaaaattagtaattcactatttttattcgtgttgtgttactcatttcttgtccctttttttaaaggcatagttttcttttgaaaatttattcattgagatccaacatcaatttactctttccgttttcctctttcctcttaaattggtgcagcatgtgaaactctctcttattgaatcatggggaaaatgattccaaaagttaaagctcaacgaaaatgaataaagggaattgactagtataaaatttgtttttatctgtggttaaaagtctcatgtgtgacttgtgattttgagagtgagtaggttgtgtgtatgtgggataggaggcttgtgagaaatctctgtaccttctgctcaattttcttgtgaacctcaaatgcctctaaaaataaaatctattagaaattaattgattgggccaggcgaggtggctcatgcctgtattcccagcattttgggaggctgaggcaggcagatcacgaggtcaagacatcgagaccatcctggccaacatggtgaaaccgcatctctactaaaaatacaaaaaaaattgctgggcatggtggcatgcgcctatagtcccagctactcaggaggctgaggcagaaaaaaaaaaaagaaattaattgattaaaatatttattctctagaagatgtttttattttttaaagtaaggattattaaataaaagtagttatacgacaaaatgcttagtgattttttaactttatctaaaatcaaaaggcattggatgttctactcctgcccaagattttacagatttttaaaataaatacatcttcagtcattcatcaagaactttttgagcaaagctatgcacaatgcaaagcaactaagatctaatatgtgttccaagtgactgtttaaaataaataacactcaccctcctttctaggaaactaaatattctctaaatcactgtcagaaacaattaactaacttcccatttcccgtcattccctattggtttctaaatgccttagagaacactaaacaaacattcctgttctctctcaagcagaaaacatttcatgaatctgggtggatatatcttattagtcgccttgggaaacagagaaaggcacacgtattaaaagaaaaagttgactttgccaaggtggaaactctttttcctccaaagttatctgaaagacctttgagttttataagaaatgaaatgaatcactaaagtcctattccaaaggtctgctgccttctgaaggcacaaataaagctgaatttctctccaaccataaggaaagaaaagatatggtacatacatttgcattacatgtattcgctgacctatcagtaaataatatttatatttatatagttgtgatggacaaatatttcttcttcttaataagtaactgcagtactgctcttagcctcaataagcaaatgagttatccctagggaacagtttagctgcattgtatttgaaaacttcaaccaatagatagtcttggggcctcatttctacaaatcagtacaaaattggtgcccccactttcttgtctttgaaacaagtaggtggtagaggagcagtttaagtgatttccactcttccttttagttctgacattgtcttaactagtgggaaggctggtcagctttattcatgctatttttctgcctctgttctccctcaaatgggaaatcaactaataaatgaaacttgacctagataaaatgaggagtgcaatggagttcatagagtaatctctagggtattttaaaaaaatacaggctgtaagaaactggggttatgtaaaaatattgtgttacgtcgttcttctgaggttaatgagtgaattgggtttctagaagtgttcatgactcagtctttgcttagagttattggcttgctatatttctatcaatcacatattgtagtttttatatagaagaaaattcctcatttccatttttataatattttcccagttattctgtagcaattatttatatgtattgacattaattattataaagtaccttgagatttgactctgctgtgtaatggtatgctatttgtataatgaattctgactatttcatcatgtaacaacaagtgccttgctagcatgtatttgattctcactcgatactctgaattgcagagcaggggcacgtcatggacaaaagcaggtttctttgctttcagagatcttggcagagctaaatgtcatgccactaagccaatttgttttgtttcacataggtgtcctaaagccagtgcctgaactggacaaaagtgctcatctgaaatgagagtatttcactggcggaccagttgctattgtatttgttaaagggtttttgctgccttaagtgtcaggcagttccaaaaagcatttattttgctccacttaaaatataagaattatgaattatagatggaaatcctatacctgttcactgtattcattttgaacacaacagaaattgtcccttagggattggtgatatattccgtcttgaggaagggccctctcactcctgtctagtacattaggcactttcctattctccctatgtggtactaaggatggattttgctaaagaggggacctacctatgtaaagccatttttacttctgtcaaagtcaagagccatatcatgatgtttgtttgcagccaggatcacaggagccagctgaaaacttggggatagaagactgggcatgcagacaatttttgtttttggagatgctgatgaggagcaatggcgttaaagagtaggattaggaaaaaagaaaattcagtggcgtaatcagaattcatgtgaaatatgaaagttttcaaaataagagaccaaatttcaaaagactaacaaatgcatgtacattctattaaacttacaatcacaataatgtagatttctttattatactttaatttctggggtacatgtgcagaatgtacaggtttgttacatagatatacacgtgccatggtggtttgctgcacccaccaacccatcatctacattaggtatttttcctaatgctatccctcccctaccctccaatccccgagaggccttggtgtacatgtgtcctcattgttcatctcccacttatgagtgagaacatgtggtgtttggttttctgttcttgtgttagtttgctgagaatgatggtttcctccctacaaaggatataaactcatccttttttatggctgcattgtattccatggtgtatatgtgccacattttctttatccagtccatcgttgatgggcatttggattgcttccaagtctttgctattgtgaagagtgccacaataaatatacacatgcatgtttctttatagtagaatgatttataatcctttgggcatgattctgggccaaatggtatttctagttctagattcttgaggaattgccacactgtcttccacaatggttgagctaatttacactccaaccaacagtgtaaaagccttcctatgtctccacatcctctccagcatctgttgtttcctgactttttaatgatagctattctaactggcctgagatggtatctcattgcggttttgatttgcatttctctaatgaccagtgatgatgagcattttttcatatgtttgttggctgcataaatgtcttcttttgagaagtgtctgttcatatcctttgcccactttttgatgggatttttttttattgtaaatttgtttaagtgctttgtagcttctaaataaatattagtcttttgtcagatggatagattgcaaaaattttctcccattctgtaggttgcctgttcactctgatgatagcttttttgttgtgcagaagatctttaattagatcccttttgtcagttttggcttttgttgtcattgcttttggtgttttagtcatgaagtcttttcccgtgcttatgtcctgaatggtattgcctaggttttcttctagggtttttatggttttaggtcttatgtttaagtctttaatccatcttgagttaatttttgtataaggtgtaaagaagggatccagtttcagccttctgcatatggctagccagttttcccaacaccatttattaaatagggaatcctttccccattgcctgtttttgtcaggtttgtcaaagatcagatggttgtagatgtgtggtattatttctgaggcatccgttctgttctgttggtctgtatatctgttttggtaccagtaccatgctgttttggttactgtagccttgtagaatattttgaagtcaggtagcatgatgcctccagctttgttcttttttgcttaggattctcttggctatgattctcttggctatatgagctcttttctcgttccatatgaaatttaaagtagttttttccaattctgtgaagaaagtcaatggtagcctgatggggtagcgttgaatctataaattattttgggcaatgtggtcattttcatggtattgattcttcctatctatgagcatggaatatttttccatttgtttgtgtcctctcttatttccttgagcagtggtttgtagttctctttgaagatgtccttcacattccttgtaagttgtattcctaggtattattttgttctctttgtagcaattgtgaatgggagttcactcatgatttggctctctgtttgtctgttattgatgtataggaatgcttgtgatttttgcacactgattttgtatcctgagcctttgctgaagttgcttatcagcttaaggagatttagggctgagatgatggggttttctaaatatacaatcatgtcttctgcaaacagagacaatttgacttcctctcttcctaattgaatactctttatttcttcctcctgcctgattgccctggccagaacttccaacactatgttgaataggagtagtgagagagagggcatccttgtcttgtgccagttttcaaagggaatgcttccagtttttgcccattcagtatgatattggctgtgggtttgttgtaaatagctcttattattttgagatacgttccatgtatgtgtccaggaatttatccatttctctagactttctagtttatttgcacagaggtgtttatagtattctctgatggtagtttgatttttgtgggatcagtggtgatatcccctttatcattgttgattgtgcctatttgattcttctctcttttcttctttagtagtctggctagcagtctattttgttgatcttttcaaaaaaccagctccttgattcattgattttttgaagggtttttcctgtctctatctccttcagttctgctctgatcttagttatttcttgtcttctgctagctttttcctgtctctatctccttcagttctgctctgatcttagttatttcttgtcttctgctagcttttgaatttgtttgctcttgcttctctagttcttttaattgtgatgttatggtgttgatttcagatcttttctgctttctgttgtgtgcatttagtactataaatttccctgtacacactgctttaaatgtgtcccagagattctggtatgttgtgtctttgttctcattggtttcaaagaacatctttatttctgccttaattttgttatttacccagtagtcattcaggagcaggttgttcagtttccatgtagttgtgtggttttgagtgagtttcataatcttgagttctaatttgattgcactgtggtctgagagactgtttattatttccgttcctttccatttgctgaagagtgttttacctccaattatatggtcaattttagaataactgtgatgtagtgctacaaagaatgtatattctgttgatgtgggctggagggttgtgtgggtgtctgtttggtccagagctgagttcaagtaatggatatccttgttaattttctatctcattgatctaatgttgacagtgggctgttaaagtcacccactattattgtgtgggagtctaaatctctttgtaggtctataagaacttgctttatgaatctgggtgctcctgcattgggtgcatatacatttaggatacttagctcttcttgttgcattgatccctttaaccattatgtaatggccttctttgtctcttttgatctttgttggcttaaagtctgttttatcagagactaggattgcaacctctgctttttcttgctttccatttgcttggtaaatcttcctctatcccttcattttgagcctatgtgtgcctgcacgtgagatgggtctcctgaatacagcacactgatgggtcttgattctttatccaatttgccactctaattggagaatttagcctgtttgcacttaaggttaatattgttatgtgtgtatttaatcctgtcattatgatgctagctggttattttgcctgttaattaatgcagtttcttcatcatgtcaatggtctttacaatttggtatgtttttgcagtggctagtaccggttgttcctttccatgtttagtgcctccttcaggagctcttgtaaggcaggcctggtggtgacaaaaatctctcagcatttgtttgtctgtaaaggattttatttctctttcacttacaaagcttagtttggctggatatgaaattctgggttgaaaattctttaagaggccaggcgtggtgactcatgcctgtaatcccagcactttgggaggccaaggctggtggatcacctgaggtcaggagttcaagaccagcctgaccaagatggtgaaaccccatttctactaaaaatacaaaaactagctgagcatggtggtgggcacctgtaatcccagctactcaggaggctgaggcagagaattgcttgaacctgggaggcagaggttgcagtgagccaagatcgcacactgcattccagcctgggtaacagagcaagactccatctcaaaaaaaaaaaaaaaaaagaaagaaagaaaattctttaagaatgttgaatattggcccccactctttctggcttatagagtttctgccgagagatccgctgatagtctgatgggcttccctttgtgggtaacccgacctttctctctggctgcccttaacattttttccttcatttcaaccttggtgaatctgacaatttgacgattatgtgccttggggtagctgttctcgaggagtatctttatggtgttctctgtatttcctgaatttgaatgttggcctgtcttgagaagttctcctggataatatcctgaagagtgtcttccaacttggttccattctccccgtcactttcaggtacaccaatcagacgtagatttggtcttttcatatagtcccatatgttttggaggctttgttcatttcttttcactctttttgctctaatcctctcactttatttcattaagttgatttcaatctctgatatcctttcttcccaagctggctctctagattcctcgtctctgggcagggcatctctgaaaaaaaagcagcagccccagtcagggacttataggtaaaaaccccatctccctgggacagagcacctgggggaaggggcagctatgggcacagcttcagcagacctaaacgtccctgcctgacagttctgaagagagaagtggatttctcagcacagtgtttgagctctgataagggacatactgcctcctcaagtgggtctccatccagcccatgtatcctgactgggagacacctcccagttggagctgacagacacctcatataggcaagctctggctggcgggtgcctctctgggacgaagcttccagaggaaggtacaggcagcaaactttgctgtcctgcagcctccactggtgatacccaggcaaacatggtctggagtggacatccaacaaactccagcagacctgccacagaggggcctgactgtttgttagaaggaaaactaacaaacagaaaggaatagtatcaacatcaacaaaaaggatgtccacgaagagactccatccgaaggtcaccaacatcaaagaccaaaggtagataaatccacgaagattaggagaaaccactgcaaaatgtctgaaaattccaaaaaccagaatgcctcttctccaaaggatcacaactcctcaccagcatgggaacaaaactggacagagaatgagtctgatgaattgacagaagtaggcttcagaaggtgggtaataagaaactcctccaagctaaaggagcatgttctaacccaatgcaaggaagctctaacccaatgcacggaagttaagaaccttgagaaaaggttagatgaattgctatctagaataaccagtttagagaagaacataaattacctgatggagctgaaaaacacagcacaagaacctcgtgaagcatacacaagtatcaatagctgaattgatcaagtggttgaaagtataatgtagattttatttcaaaaatgcagaaaaagtagaaaaggaaaaattgaaagaagggagtaaaaaaggaaataaaacatcataaacatattgtccctttaatggctaaaccagtgtttaaaatgtaatgtgcattaattgcaatccatattcaatagagagaattatttaaggcagatttttgaggaaaattgtgaaatttctttccctggatgaatatttttaatgtggcatttatagaccctttaatgaaaagctagcccattggagataaaggaggaacctagagaaatagccacaggaacatcatttgtgagacgcacaattcacagaggaacacagaagccaaagcattttcacttccccagaatttcttctgtgaaattacaaactctttctgatgaataattttctccaatccaacgattatcttgagaatcctttgtgaaagagcctgccttttcctcctaagcaatgcctgcaatctaacatttcacaagcatcctctgagacctgtggttggaaggaattgctatcaaggaggcccacattaaggtaaactttcttatgggaacaaagagtgaggagaggacttgatgtcatctctttcaggccagtgccacaaagatgcccaaagttgggtcttggctaaaaattgaccatcggtcatagtctcctttagattaaatgagtcaaaagtcaaacctgagtaattttcattgtctctagaaccacactcacaaaaatctcattacatgacactgtttgaatacaagcacacaagtgtttctctcccctttacagtcttaaaagaaatttagtgccttgtataacacctacctaaagcctcgcatctgaaagccaacatcaccaaggatttgccttaatggtttacttgcagccctacactttatccttaatactgtgcattcatttgctctttttcttcttctttggtaagaaagatttcctagcctggaaataaggcacttctcttcaaactccttgggattctctcatttgctgccttgattcatttcccttgttcaaagaaatcttttatcaagtctctgcctgtattttggctctgattgctatatggctacatcctgtgctcagccaaccttgtatctatctttctaccttcatctctgaatgggataagcctggaggctgctcaatgacccagaagacctctaaccccttctgaatatagaagaatgagtatagataccctctgaagacacatttcacttctgcataactttaattctatgtcttgatcttttgtatcttaaatctctattcccttcagaattatcagattttctatttcctctgccctttgatgacctccttgagcctccgggagacttgtctcaaaattatctcactaattatcttgaaatatttcctggttaaaaattctctttcaaaagcaagatattatcttatatcactgcattttgttttgatttatctgacaaaactttattaagaaataagtcatcagaaaaaatattttattaatacttaaacctactatgcagctcgttttgcttgcagtttaacctggacctgttaactttgaatatgaatgaatagttcaagttcaatcactgtgtcattaacaaggaaaacttccttgaaaatattttattctgtcttaactgtgttctctggaaaaaaaaaaaaaaaaggtgtatttccatatacaaagcttttcaaatgcccataggcactcacagtaaccgtgcagaacctcttcaactaccgtaatctgcctgaaaattacaaggtttactatcaaagaggaaaaattgcaattccgcattcaggcaacttgttctggcagagtcatctctcatataactttttagctagatgtgcctccattttgttatggaagataatgatagtggttattatttgtatcattttattagcaatgcctctgagcatcctgtaactctgatttgtttgacagttgacatggcatgtttaaatcacagaaaaattggctggtagaaaataatgcagctgtaacagggtttggtacattgaatttcactgacattgctacttatgaaaggagaaataactcttttttctcgcttcatcacttatgattagagggcccagacagttcaagcaatatagtcagtgctcaatatattttactattctttctcaaagataaattcctgtcctgctggatctatttctattgtttaaaggggaagtgctgtcatgttccgtaagtatatgaaggtagacgaatgacaatgttcataacttggagaagagactgaccacatcctatcacatctctctgaatggatgcagggactgttccagtgacttaaggaaaacagactttgtccaggaataatgaatgacttttcttgtctccactgcagcagtgagtgaaggaccaactacccaacaaccacctatgctgcccccatctcagcctgagcattctagcagcgaggaggcaccaagcagaaccatccccacagcttgtgttcgaccaactcacccactccgcagctttgctaatcctttgctacctccaccaatgagtgcaatagaaccgaaagtcccttacacaccacttttgtctcagccaggtaaagtactcggttgttcacctttaaaattcttattattattggtgcctctatttaagtgcatgagggtgcttgagaaggcctagatgtcatatatcttttcaatgctgattacatgcccagtgtgctcatttttgttactgatgcttgtagtgtaacccttaatgacccacctcccaagcaactgattggttgtaggtgcttttcatccctttggaaagttgtccatgaatcctggaagccagtccaccatttttaatatgtgctataggtgtgcttgctagagaatactggaaacattcctgattccctaacttcattctgccacatgagttctaagcgttaaagctagactgcaagactagatgtaaaggtataaaaatctgcaaaaccactttttagagaaatcataattctaatttgtgcctttcaatagtcatttctcaggagttcttatttatttcagagtactaggccacaaagaaatgtcagaaccagtgctgagtacaactcaattaattttaaaaatgaagaaactaactaacatttagattgatagaaagtaaaatatctatggtcctttctaagaaaataagatggcagggatgggaaatgagtcccagattcccaatgcagtattgattttattacttcagctagtatccaaattgagctccattttgtttttgttaggggttgaggagggggagagagaggcagagacagaagaaggaggagaggaggaaaagaagaaacaggtagaatgaatgtcaatagataagtagagataaataaataatagtacttaaaattatttggaatattagaataattcttaaaatcctcagtatatcaggcataagatagtaaatttcagtaatctgagatggcctccttgatgagcataggcagctgaactgggctaatctacattatgctcatacatttgactaacttttctgttactcagacctacaataatttattttgttgcattagtacacaagccacataatgactgtaaaagctagaaaaatgattgtctatgaagtataaatattaattattttatattaagaatgtatctagttgctgggatgacattagttgatttgtacacatcacctctgatgttctcaacattcacatgatgtgcaatatggatactcagctacacagcccctgggaggtggagtggagcatgaaggcatgtaggattccattggttgggacgcacgttccactatggagtcttccttgacacataggctcagcacaggtcatgatttcattctacaagagatggcccttctcaccccagcaaagcccacatagggacttaaaaaggtctgtattgcccaagcccctctctccaccctcccatgcatacacactccacacatactacattatggggaggatctgctactttatatggccccaaaactatgaagtctttgataattgaggcagagacaacttgaagcaagagcattcatttactgaaattctggtgccaagagcatgcttccttgtgatttctggctgcatctgtttccccactgcaagcacaacccaaggaaacagaccttgaaggaaactagtattcaagatagttgacagcttaattgcaactgctaacaataacgagcctttaatgaatctttaatgcacatgcctataggacaggcatgattctgaaggcttattacatctcatttgatcctctaaacaactttgtaaggtagctattagtcttaaccccattttaggcacaaggaaactgagacacagagaatttaagtagcttaagtctacatagcaagtaagtaatgcatcttttccctgctctcctgggttctcaaattttagaaactcatttgtgcctcttagtttatgtctaacttgtttaataagaaaaagactaataaaacgactaaatcattaaattaaatcattagaagaaaaaatcaagaaacatcttaaaataattctgaattgaagaatatattttctcatcagatttcttcactcacattttaatgaggaaaggtaagaaccttaactattctatagtaaagaggaccaatttgatagcaacaaaaagtaaagtgcggttgcagcagtttatgctgttaatgttctctcggcttgcaagtaaaaactttaagaataaaacagctgaaaatgacattctggaggctactatggctactttaaatgaaaaattttactgcaccagtgatgtttagtttgggacacaagatttggaagtcaacctatgctctgaagtgctacaataacaaaaggatacaattttttttaaagaagatttgatgatagatggagcagagaattggcatttttttactagttatttattttcttctaattacattaatgccaaagctgcctaaaacaaaatctgatacaatgcagtataagtggattatgtccttcatagaagggaagtagaatcagttgtgctgtttctatactaatttcatcaaataataagcatgtctgaagagccaaagaaccattctctgatctaatggcaacaaggcaaaatctcgttttcttttattttcatggtacccttaagatccttcttttgtttttatttgaactatttctctcaagccatctcttctttcctattttcagatatctctggctagagtttttgtttgattttatgttttttatagctcctctttaaatgccactcctctcccccactcaactggaggcatgccccgccatccctttggaattattaaattctttttcctttagtgtttctctcttattgtcttcctatgattcctgttcatttcataatgtcttacctcatgattttcaaataagttcttcctgcattgctcctgacacatggtaaatagcatgctttttaaaagggctaatgtttacttattctgatagaaaaagaaaattagcagactgacaaatgtattagctgtgacattaactacatgcttcttagacttaaagatgaaatacttagagctttcaacaagttttgattctaagaaaatcattactttcctcaaaccgattgatgaagtaaagtcattctcttgtcagcttttaaaaaaaatacctcaaataattttactgtggatttcacaagaaaggactgcataattagtgatgaatttatctttacttaccgcaagtaattactttagaatatggtaatgtgaggcattgctctaatttttaaaaatgagaaacttctactttgaaagctttgagattaggatcaaggaagaagctctttccccactcaaattcctgtgtgtgaatttgcttttttttttaaatttattttattttaggttctggggtacatgtgcaggacatgcaggtttgttacatagttaaacgtgtgccatggtggtttgctgcacctatcaacccatcacctaggtattaagccctgcatgcattagctatttttcctgatgctcttcctcccttcaccctacccaccgacaggccccagtgtgtgcagtgtgtgttgttcccctccctgtggattttcatgggcaacaccatcagtctgtgccttagtttgcctcccaataaggcacacagagctatgcttgcagcagttttacatgggtctagggcaaaacatattatgcagtaatagtctccatggggttgcagagcattttgcaatatttttatagtaagcagtaattagaaagccattctgttgtcataacgactgaaattctgcttacctgaaaacagattcatttcctcaattttttttccttccacctgctgagttaaaaatgtaacttacaagactctagggtatttatggtgtttcttacaatttcatcatcaccttataatagagtgcttccattttttaatgctttatctatagacgtgaataaccgtgagatctttacacatttcatggaggctgcaatcactacactttgcaaatcacaaatgtagacatgtaagtgatttggcttagtccactttcaggttaaatagaaaatgtttgatagagtattgggcttattgcattatagatctgacataaattttacaaagggctaagatagggtgtgtgggtttttttcttctttactagttaaaattccttttagtgatcagctgcactttaaatgaacctgggttaggagaccatttgtcttctagagatgtaattctaaagggaaagaaaatgtgatctcttaaatagtgacctttatatcataatactcttttataacattagccccctggacctcttgcaactttgtaaaactccataagcactatattttccttcatttacacattgcattttacacacatatatttataaaagcaaaactccagagcattctgatcttttccatcttcaagggatcaatatgtcagtggacatgacaagtccaaaactcacttcattgtactgcgaaattgagtttgattttccccgtgcaaattgtggcatgtgctttaatttgtctgaggactgaagacaaggagggggtggaggtggctgacagtggacagaaaaggcgtttgatttatattttatggatggttgggaaatcatgtattcctgctgtaacctgatctttttggcaggccttatttcagtaaatctgctatcacacaaaactgccaataaattactataatgccttaatacaattgctttccctgagccactcgtaggctgccattgcgggtattcatcaagaataccacacgagtgttccattctgctaaaatcagccacaggcagaggtcatgggagatcagacatcctttagaaggtgacacaagacggtcattttaaaggccagtcagatagaataaatcattggcacagctaaataggagagatgtgttgatttgctgttattgaagccaatacttccaatcaatgctatagtggaaaattacactacatctaagtttcatctcatgtgaaagctatcggtgtggctttttggtagacatctccttgaaattttcctgtcctcactcctaacagaattaggatgattcgatttggtctggtcatcctaaattaccattggtaaaatgtaattaaggcaaatttaagtatcaataatgtttgtgactctggaacctacctacttggtggcttaataaattagtatttcctctgaggttttagaaaataaatattaataggaaaagagctctgttaattgcccagaggagagagaaataatttctagaagagtcattatgcgtaagccaagtaattgatgccctatttataagtgacaaagcagaggcctaaaaacgttaggtagcttgcccaaggtcaacaattgaggtgacagccaaatgtaaagaatttggagaaatgtttttttgtttgtttgtttgtttttttaactaactttgaagatagatagatacaggattttacctagcttttttgtgatgttaacagttattcttagagtgactttttccccccctaaaaggggtcttctaggatcctaataattaaatattctttaggaggaactacatcaggtaagttaagtcatttagctgagtgtttgagtaaacattttattcctttatgttggcattacatggagaggagatgttatagcaaaagtagcaactagctggagcactctggaatagctgccatctgcctttaactcacctgtccagtctgtcgagtatccctctacggtaaggcaggaagccaggggctgacatctgacatctgttgctttcaccatcactgatggccaaggctttagaaacaaattaaaaaaaataaagatgagcataaagaagtatataagagtttaaggcatatgggactattgcttacaatgggagttggagagtgtgagcataggtcaatgagagcaaaaactgaacagctagtatttttcagaattgcaaaaacttcttttggggagggagtgaatgactgcagtagaaaagtttgagtcccttttatgaaaggtttgcccaattacaagaaaatatcgcatcaagaattgttagaccatatatgaaactgaagttaactatatcaacctaatacaatgaaactctgaggttaaagtattcagtggccatccagataatcgtaagagaaagtgaaaaataataaataatctattttcagaactttgtaacctaatagaagacataattcgaaacatgtaagctacaaagaatgtacttggattatactgcagagtgggtggccgcatgagtgacagaaggaatggtgaaggaaaggtgggcagtaggttgttttcaaggcagtaaatattccttttacatttcttatacacttgatgggtcacatggttaactactgctgtatagattttgttgttgttttgaaatattttgaaaataaagcatctttttaaaaatcaacttacataaaagtagtaaggcttatgctttatactttgtcacctttttatagtttacagaggacatttccaaataaatgtatatctacctgagaagtaactttgaccagcattaccaatacagaggtcaatatttagagaggttgaatacctttcaacttttccagggtcatgtgtcattattcttaggaccttcatcgccacccttacatatggtggacactcgaatgttggttgaattggtcagaatataataaaataattaaggtgagagccagaatttgactgcagttcttcaatttcaagtctaataatgagtttagacaaaccagagcgacttgtaagtttgtaaggattagatatcaggtactagaaaaagataaaggcagatacgatgaaataacttacaaattcatgaacattttataacatgtttaataatctgaactataaatagcatcttatgctaaagccaaataaattgcatagagtggaaaagacacttgaaaccacagccctcggaaattcagtggtttatttttatgaaaataaacagacatgcagtggcctccataaagaagaatagaattctctgcgttcatagaaaggaggcggccaggtgtggtggctcacacccgtaatcctagcactttgggaggctgaggcaggcagattgcctgagctcaggagttcaagaccagcctgggcaacacagtgaaaccccatctctactaaaatacaaaaaattagccgggcatggtgtcatgtgcctgtaatcccagatactcaggaggctgagacaggagaatcacttgaacctggaaggcagaggttgcagtgagccaagatcatgccactgcactccagtctgggtgacagagcaagagactccatctcaaaaaaaaaaaaaaaaaggaggaggagtgtggatcagtggaagtcagtcagagtcctaaggactagtctctccatcatgccaactacagaactgattttgctcttctgaatctcacttttctcatctgtgaaatcagatggtctttcctctttaaggaggaaggaaacatgaaattctacaacctcagttactacagaaataagggtagatattctccctttctcctttttgttttgtgaaagactatgagtaagagaaaggttttaatttgaatattttgagactcatggtatacattttaagtattctaagtagttgacagatctttaaagttcttcaatgagcatcaagttacagttgctttctttggcagcaaggggaaatgttgaaataaagtgctcacataaacctctgtgctaatggactattgaaaatgtgttatgaaaaatctaacatactgaaagcaaacaaaaagtctctgtcatattaaacagtttaaccatcagcaacccatttctaaagacatgacctgtagtacctaaaagactgtgtgaaaaacagtcttcgatttgaatgtttataactcttatcttactagcagggacttataaacgaattcaggtgtcatgttaaacatcttgtgtgtgttccagcattgactttcatcttaggcttgcaggaggactgatgttcttatctccaggatctccttatttaccggaatatcaaggctcttagaggagaatgcctttatcttctgtggtaaaagggattctacaagcttttttggtggaaaacaatgataagtaagccctattcatgaaaccgtatgcctctcattttgaaatgaataattgcacgtacagacttataagaataatggcacttatagtgactgctatttttaatgtctttttcaaagtgctcttctaaaacattcttctttgacatttctgattcttttacccagcaagttttatgtatttttctacttctgaggtcacctgagtaagaattttctaacagataccactttttttttttttttttttgagatggagtctcgctctgtcacccaggctggagtgcagtggtgcaatctctgctcactgcaagctctgcctccggggttcacgccattctcctgcctcagcctcccgagtagctgggactacaggtgcctgccaccatgcccagctaatttttttgtatttttagtagagacggggtttcaccgtgttagccaggatggtctcgatctcctgaccttgtgatctgcccgcctcggcctcccaaagtgctgggattataggcatgagccaccgcgcccggccgagaccacatttttttttttagacagtctcttactctgtcacccaagctagagtgcactggctcaatcacagctcactgaagctttgtcctccctggcagtggttatcctctcgcctcagcttcccgagtaactgggactacaggtgagcgacacctcacatgactaatttttgtattttttgcagagatgaggttttgttatgttgtccaggctagtctcaaactcctgggctcaagtgatttacccacctcactctcccaaagtgttaggattacaggcatgagccaccgcgcctggctaagactgcatttttttaaaccacgataacctagtatgctcttgagtcaaaaattaacttttagttttagtgttgcacttaaaagaatatagttatttgtttattttctttttggctacgctctgagtggtacctcatttaatagaaacaggctgcttggtgcacacatgcctgagctgacacattagaatacttgataaatctggagaacacattgcctgataagttgagcccagtgaagttttcatcaccttatgagagacggtgagcagaggaggtcagagcaactgctcagagctgtctgaatgtcgttcccttagtctagagaaaagagtggcctctttcatttggacagggcttgctctcaaatcataaatgcatttgacagccaggaagccattttcactgtctcacttaaatggtcacactgcaaatgatcccaccacattacaatagcataggtccccagtaaggccttatatccaacaggtgtacagattaggtggtcactacctggcttcttctctctcataaatactgcatctcccgacttgctcctcacaatggaccaatttaatgtgattaaagcttctggagtttcctagatcccagctctaacttccagtttagctattccctgcaccaactctctgcaaagagaatcaatagcaaagcaaagagggataagaagtgaggagtaggaagtaagctattgaaagtgagaaaaagaggttatttctcattgagcacatgtaaaacactactgatgtctttgtcttctcactgaaaaattatacattttgtttttattaagcatgttacagtatgggtaatgtccaaacatgatttgagatataaatattaacttctaagctcagcatggacatggctatcaaaagcagtgtttctcaagttttgtgtgcctgggaatcacctgcagacattatgaaaaggcagatttagatttagcagatctagagtagagcctgaggttctgaattgctaaaaagattctaggctttgctgaggctgaccctctgcagattagattatgaggtagtttggattttgaacagattggatgctcttaacctggggttcatggaagaacttgtgggtttggtaactcacttgaaattaaatggatatttctctgtgggtgtgcctgtacatttttctagcaagtgagttcatagcattcattagtgtctcagatgatttattatctataacaggttaagaaccacttgacctgctgttttgtcatcaccctcaatgtagctcacctgtggaacataaaccaatgtctgtttttcttttgttttgtttttcaagatcagttccaaaaccttgtactgaaacaacttttctgaatctgaggccaaaagctgagtacttgtgctctactcaaatgaaactctgcaaaatttattcattttcatagaaacacctgaggctttgtacatttttcaacatgtgatgagggaattagttaaattagtatttataaatttgtccttcttctgcaacaatctcttatttttattgcctaaatgaacatcagtagatcagagccaccgctgtccatggtatattttctccaaaagatgagctcctgtggggaaatgggatgtgttgtccttcgaaaggggtcatcctaacctgtccttagcacccctcaaatggtacactgaaaagcacttcctgcagagacttaatgactgcacacacatttccccaaacatgactcatcatttaataaaaatttcccattcagccagtgtcaccccaggttgaacagcatatgcaatctgtaaaataaattttaatattttttctggtggtagggagggtaagtgaacccatgaatagtgataatgttaaatcacagagaatgggagctaattaaaataaatgtttatttgagcagtcaagtagttcaattgtattctataatttcccagaagatattatcataaatcatttattgggtacaaaaatgccgtaagtcaaaagagtatgtgtttgaggaggctggagagtgctaaagaggagttgagagaaaggagtgcaaaaacaagaaagatatttgaagacagttttcatcctttgcattattcaaactaaagaagctctaaagccaagtactatgtttgtttgttattctttcccaagacttcagaaattttcacttccatgatactgtgatgtttatatttatattggctccccatttaaactggaacaagtctagctgggatcaacatagagaagacagcaggaatatgctgatttactcctattccttcttctacctctttcatcaccccctgccaccatcccacactataactgctgtctcttctccttctctctcactctcacatactcctctcctctaagattgtctggcctgttctgtttcactcagctttctatcaaagcctaccttgtagaattttttatttttgtctaagaaagaacatataatttaagccttacttatcagctgagtggctttgaacaagtcctttatcttctttgaattttgattttcctatccccaaggcatgagcaataaggtatgctttaaaagttctattttaaagaacagataagaaaatgtaggaaaaggtgttttactgcagtttatgtacctgtaggtgggacaaaggttacctgttttaccctttctctctctaggttttagtttataaaaataatagagacaaggtactgataaccagatgggaatcaaggattgcagagaatcacagccttttggaaaatggtaggagtaggtggaagacctcttcctccctccctgactacaagaatattcgacctgctagctgtaaactgaaacagacagtagagaggtggctgggacttctggagtcaggccttgccttgtttgcttaacaaatgcaattcttgtgaagtttaaggatagagggtcgagaagccaagatggccgaataggaacagctccggtctacagctcccagcgtgagagacgcagaagacgggtgatttctgcatttccatctgaggtaccgggttcatctcactagggagtgccagacagtgggcgcaggtcagtgggtgcgcacaccgtgcgcgagccgaagcagggcgaggcattgcgtcacttgggaagcgcaaggggtcagggagttccctttccgagtcaaagaaaggggtgacggacggcacctggaaaatcgggtcactcccacccgaatactgggcttttccaatgggcttaaaaaacggcgcatcatgagagtatatcctgcacctggctcggagggtcctacgcccacggagtctcgctgattgctagcacagcacggcagtctgagatcaaactgcaaggcggcagcgaggctgggggaggggcgcccgccattgcccaggcttgcttaggtaaacaaagcaaccaggaagctcgaactgggtggagcccaccacagctcaaggaagcctgcctgcctctgtaggctccacctctgggggcagggcacagacaaaaagacagcagtaacctctgcagacttaaatgtccctgtctgacagctttgaagagagcagtggttctcccagcacgcagctggagatctgagaacgtgcagactgcctcctcaagtggatccctgaccccgaccccccagcagcctaactgggaggcaccccccagcaggagcacactgacacctcacacggcagggtattccaacagacctgcagctgagggtcctgtctgttagaaggaaaactaacaaacagaaaggacatccacaccaaaaacccatctgtacatcaccatcatcaaagaccaaaagcagataaaaccacaaagatggggaaaaaacagaacagaaaaactggaaactctaaaaagcagagcgcctctcctcctccaaaagaacgcagttcctcaccagcaacggaacaaagctggatggagaatgactttgacgagctgagagaagaaggcttcagacgatcaaattactctgagctacgggaggacattcaaaccaaaggcaaagaagttgaaaactttgaaaaaaatttagaagaatgtataactagaataaccaatacagagaagtgcttaaaggagctgatggagctgaaaaccaaggctggagaactatgtgaagaatgcagaagcctcaggagccgatgcaatcaactggaagaaagggtatcagcaatggaagatgaaatgaatgaaatgaagcgagaagggaagtttagagaaaaaagaataaaaagaaattagcaaagcctccaagaaatatgggactatgtgaaaagaccaaatctacgtctgattggtgtacctgaaagtgatggggagaatggaaccaagttgggaaacactctgcaggatattatccaggagaacttccccaatctatcaaggcaggccaacattcagattcaggaaatacagagaatgccacaaagatactcctcgagaagagcaactccaagacacataattgtcagattcaccaaagttgaaatgaaggaaaaaatgttaagggaagccagagagaaaggtcgggttaccctcaaagggaagcccatcggactaacagctgatctctcagcagaaatcctacaagccaaaagagagtgggggccaatattcaacattcttaaagaaaagaattttcaacccagaatttcatatccagccaaactaagtttcataagtgaaggagaaataaaatactttacagacaagcaaatgctgagagatttttgtcaccaccaggcctgccctaaaagaactcctgaaggaagcgctaaacatggaaaggaacaaccggtaccagccgctgcaaaattatgccaaaatgtaaagaccatcaaagactaggaagaaactgcatcaactaacgagcaaaatcaccagctaacatcataatgacaggatcaaattcacacataacaatattaactttaaatgtgaatggactaaatgctccaattaaaagacacagaatggcaaattggataaagagtcaagaaccatcagtgtgctgtattcaggaaacccatctcacatgcagagacacacataggctcaaaataaaaggatggaggaagatctaccaagcaaatggaaaacaaaaaaaggcaggggttgcaatcctagttctgataaaacagactttaaaccaacaaagatcaaaagagacaaagaagaccattacataatggtaaagggatcaattcaacaagaagagctaactatcctaaatatatatgcacccaatacaggagcacccagattcataaagcaagtcctgagtgacctacaaacagacttagactcccacacattaataatgggagactttaacaccccactgtcaacattagacagatcaacaagacagaaagtcaacaaggatacccaggaattgaactcagctctgcaccaagcagacctaatacacatctacagaactctccaccccaaatcaacagaatatacatttttttcagcaccacacctattccaaaattgaccacatacttggaagtaaagctctcctcagcaaatgtaaaagaacagagattataacagtgcagaccacagtgcaatcaaactagaactcaggattaagaatctcactcaaaaccgctcaactacatggaaactgaacaacctgctcctgaatgactattgggtacataacgaaatgaaggcagaaataaagatgttctttgaaaccaacgagaacaaagacacaacataccagaatctctgggacgcattcaaagcagtgtgtagagggaaatttatagcactaaatgcccacaagagagagcaggaaagatccaaaattgacaccctaacatcaccattaaaagaactagaaaagcaagagcaaacacattcaaaagctagcagaaggcaagaaataaatcagagcagaactgaaggaaacagagacacaaaaaaacccttcaaaaaattaatgaatacaggagctggttttttgaaaggatcaacaaaattgatagaccactagcatgactaataaagaaaaaaagagagaagaatcaaatagacacaataaaaaatgataagggggatatcaccactgatcccacagaaatacaaactaccatcagagaatactacaaacacctctacacaaataaactagaaaatctagaagaaatggataaattcctcaacacatacactctcccaagactaaaccaggaagaaattgaatctctgaatagaccaataacaggatctgaaattgtggcaataatcaatagcttaccaaccaaaaagagtccaggaccagatggattcacagccgaattctaccagaggtacaaggaggaactagtaccattccttctgaaactattccaatcaatagaaaaagagggaatcctccctaactcattttatgaggccagcatcattctgataccaaagccaggcagagacacaacaaaaaaagagaattttagaccaatatccttgatgaacattgatgcaaaaatcctcaataaaatactggcaacacgaatccagcagcacatcaaaaagcttatccaccatgatcaagtgggcttcatccctgggatgcaaggctggttcaatatacgcaaatcaataaatgtaatccagcatataaacagagccaatgacaaaaaccacatgattatctcaatagatgcagaaaaagcctttgacaaaattcaacaaccttcatgctaaaaactctcaataaattaggtattgatgggacgtatttccaaataataagagctatctatgacaaacccacagccaatatcatactgaatgggcaaaaactggaagcattccctttgaaaactggtacaagacagggatgccctctctcaccactcgtattcaacatagtgttggaagttctggccagggcaattaggcaggagaaggaaataaagggtattcaattaggaaaagaggaagtcaaattgtccctgtttgcagacgacatgattgtatatctagaaaaccccattgtctcagcccaaaatctccttaagctgataagcaacttcagcaaagtctcaggatacaaaatcaatgtacaaaaatcacaagcattcttatacaccaacaacagacaaacagagagccaaatcatgagtgaactcccattcacaattgcttcaaagagaataaaatacccaggaatccaacttacaagggatgtgaaggacctcttcaaggagaactacaaatcactgctcaaggaaataaaagaggatacaaacaaatggaagaacattccatgctcatgggtaggaagaatcaatatcgtaaaaatggccatactgcccaaggtaatttacagattcaatgccatcctcatcaagctaccaatgcctttcttcacagaattggaaaaatctactttaaagttcatatggaaccaaaaaagagcccgcatcaccaagtcaatcctaagccaaaagaacaaagctggaggcatcacactacctgacttcaaactatactacaaggctacagtaaccaaaacagcatggtactggtaccgaaacagagatatagatcaatggaacagaacagagccctcagaaataatgccgcatatctacaactatgtgatctttgacaaacctgagaaaaacaagcaatggggaaaggattccctatttaataaatggtgatgggaaaactggctagccatatgtagaaagctgaaactggatcccttccttacaccttatacaaaaatcaattcaagatggattaaagacttaaacgttagacctaaaaccataaaaaccctagaagaaaacctaggcattaccattcaggacataggcatgggcaaggacttcatgtctaaaacaccaaaagcaatggcaacaaaagacaaaattgacaaatgggatctaattaaactaaagagcttctgcacagcaaaagaaactaccatcagagtgaacaggcaacctacaaaatgggagaaaatttttgcaacctactcatctgacaaagggctaatatccagaatctacaatgaatgcaaacaaatttacaagaaaataaacaaccccatcaaaaagtgggcaaagcacatgaacagacacttctcaaaagaacacatttatgcagccaaaaaacacatgaaaaaatgcttatcatcactggccatcagagaaatgcaaatcaaaaccacaatgagataccatctcacaccagttagaatggcaatcattaaaaagtcaggaaacaacaggtgctggagaggatgtggagaaataggaacacttttacactgttggtgggactgtaaactagttcaaccattgtggaagtcagtgtggcgattcctcagggatctagaactggaaataccatttgacccagccatcccattactgggtatatacccaaaggactataaatcatgctgctataaagacacatgcacacatatgtttattgcggcattattcacaatagcaaagacttggaaccaacccaaatgtccaacaatgatagactggattaagaaaatgtggcacatatacaccatggaatactatgcagccataaaaaatgatgagttcatgtcctttgtagggacatggatgaaattggaaatcatcattctcagtaaactatcgcaagaacaaaaaaccaaacaccgcatattctcactcataggtgggaattgaacaatgagaacccatggacacaggaaggggaacatcacactctggggactgttgtggggtggggggaggcgggaggaatagcattgggagatatacctaatgctagatgacgagttagtgggtgcagcgcaccagcatggcacatgtatacatatgtaactaacctgcacaatgtgcacatgtaccctaaaacttaaaatataataataataataataataataataataataaaggatatagggtcttcaatgtcaatgcccaatgtcaagcccaagcaggtttaaaaacttgagtagtaaccattagtaccttaaccctctcgtctcatttttcacagacaggtggcccaatgaaagccacgttacttgtgactcagagtagccctttcttacaatgggaggaggagaaaggagcagagaggggagcagggcacctcatcagcacgtccccagtggtcaaataggctgtttcccttatttttgaggagaaataagaaggttgggagaagaacacaatgtttctctccccagaagtggcatttagagatgtttatcacccttaaagtacaattcacatggtagactaaaatgccttaagattgttgcaaaatttatagtttgaaattcgatcacttatgagggatgcctgaggctattgtgtctgagtaaatgcggctactctctttttgttcaatatttgttgaagatgaaagggtagagtattacacaaagtttcccatacatatcttttatttctcccatgccctcaaaagttccttgcctatcagaagtgtaaatgattatgtgacacttctatatctgcccccagataacccgagcacaggctagttacttaataataagtatatataagaataatattctggttcacagggaaactagactgagagagtccatttcattttgtctggcatcacagaatggatcagagacaaagcagagataagaacccaggcttcttcaaagccaccctttttaactttgttcttaagggtaaaggaatggaaaatgaagtaggaaataggaaaaagtggggaagatgtgagttaatagtgaaatcaaaaccatgctgtgcattggcctctgatcggaccctggtgagcatttttagagcattccggctgcagcctaatgtttctcaccccaaaaaattattttacatgggaaaaccttctgcagagagatgctagcaggagtctgcacctggcagtcctatgttatgtacctaatgagtaaatgaaatgtttaataactgtactgtgaaaatgaagcttaaaacagtaaattcctgctgaggctgctcttctgcacctgaggcacactgctagcccatctcagaactccagcccatttttattttttcctcttagtgggtcctgctgaggagataacactaaaaccaaagcgatgctcacttaattagttgtatatcagtgtaagaacatttacttagcacatcaacagccagcgttccaccaaagggtcgcctgaaacttctccaacatgcaccctggataggggaaattctgcagtggcttcagattgagcattcgtaaatttaaatttgtcaattagccatggatcatttaacctcagaaacgtaataccacttatttttagagtatctgtttgaaatacaaaagcagtaaaaccttaattgttggtatagcttttcactaataattttaagaaaaaaatgacagaacatttattttttacaaagcactagtttaaaaataaattattgcaatttgagttaagctttaactggctggagattcctttagattcaatggatcaactaattcttcctaagtcttaaggagaggcaagaaatccaaatgtaaagttaagtacaggtagaatagctatattatccttgtgtaattttcatagctaataacttaaaaattaaatttcttacatttatagacatacagaccccaaaatccaaagaaattagactatcgagccaaggtcacaaaactaggtcctaggctaaaatgcttcctcagtatctggaatatttatttgagcactcattaaatacttggaatttgttgtatagatcacacacagtttaccatcattgaaaataataatatagatcagcttagacttcagagtgggaaacgtttcatctttcaaggcctatttgcaaaatgaaaggtgatttttccaacttctcagagccccagtactgatcctcttctcactagctcccacccagccttgagcacctccctctcccaaaatgaagtgttttttttttttttcttaaccacattttgaaaatcacttttcatatttgggagagatcccagaggatgctgactccaaaattgagattatattcacagctaggagccatggaagagattcttttcatttttatttttcctttgacatatgtttctgatagagctcatagaagttctatgaaaagcgttcatgtttaggccaattgtcagtgttaagtgttgttctccaaagtgaataaataaatatgaagctttccctgtagctacaatctagatctaccaacatagaaaaagtcatcaaaaattctatcatttcttaacattaaagaacagcattttgatatcccaaagtaataagttttcagtttgtttttgtgttttttcctaattgccataatttctattagttcttgggtaggatggtggctctcttctagtgagtcaaaacactgccaggcacaccaaaggctctcatgcctcaaggcagtccattatcaagaaggagtcaccaagaatgggtgaggccagggatgcataaacaaagtgggctttaaacctggcttctgaaagcagtgtagaaaaaaaccagttagtctcccaggaagtgtggcaatgccccatttcaatgtcaaagtctttgaaatctaggaaagcttcatgtggaggaacagatcggggttaggacaaatagtcacccgacagtagcagtgagtccatcagcagatgagaggccgcaatatggtgtccagtatcctgtttggattggaccatgctccaggcctcactcactaatccacatgcctgacgactacattgccttctcatttgaacatagtccataccagcagactgattattttacataaaaatgttcatttggtttaaatggtgtagaagatggattgagaatttagacacacgggaaggtgactgatcaggtctcaggcacaaggcaaaagattaaaggcatgtctcatagccccatgaaagaacagagatgcagaccagaaaatcaagaaagaagccatttatgcttggtgagctacaagcacttaaggaaaaagcactgcttggtgagcttgtagggacccagatttcaccagtgcacaagcttgaaatattgaacactgaatctacacacaaaaaaatacaaacatcatgtagggatggagttatgcacaaccaggaacatggtgtctgccttccgacaaaggatgttttcatggaaatcttggttttcaaacatttattctccttaactaaagggcaattttgagaccacggttgcctaattagttgttaataaatctctcctgggaaatttccctcatactctttcctttaattgccctttcaaggaaaggaaagaaaaatattaagtccatagagtgtcccagtcaaatcctgctgacaatgaactctgggaggctgtttaaattctttgtctctactagaattttattgaaattaattctaccttcctctccagggacctcagtattctcttcaacaaaataaaaggaaggtcattcgatgagctccaagagccctcgtggttccggcattctaaatttctgtgattctatgaatattacttgagaaaaggcagtcatctgaggtttaaacactctgtgcggtctttgagccgagacaatgtcttcgattccttttgtgaggctcaccatgtcttgtacatttgttcaacactcactacattttgaatgcataactgttgcctgggcactagagaaaatcaattattataatgaactttctaatgagtttgagggatggtagtctttaggcatgtccatgccctattgtaataataggagtgtggttgatgcagtatgatacacatagtgcaatacacctaagtgtttggaattctgggaagaaaatacaccataagaatgtatttccatcgtgataaccataggctatgcctaggaattcatttctctgcatgtaaaactgacaaaaaaattgtgatgaagtacatgttatggaattatatacagcagtctggtatattctaaaagaatctttacttttacgtttctcagaacaggcactggccctacttgaatttcctacatagtaagctatgcctatgcctttcactttttattgtagatacctatgttagagtgaattgattttcagaatgtgttaaacatgcattgcatgtgtttggttacatattaaattgtaaattttcagaagtagctgagtttcttaaacatgtttttaaaatgaaaaatttaaaataaaataaataggttttatgatcaagggagtctaggtcaaaaataagtaaaagatgtgtgaaaaaatatatagagacaaatgttcatttttaaaatgcagctgctgtgttaaacataggaatggataagagctagcttctggaaggtgctaagaggaacagcttttgtgactattataaattcaggtttaatcagaacattgcaagcattcttgaagggcatacaaacaaaattcaggcaacacaattcaaaatatgtggttggtagataccttctcaaggtttatgcctctttttaaagcttttaaactttgtgaattcctttttaaactttatgccttcacttaaataataacctaaaatatcaacatgaatttcacatgctgggttatctgtacctgccaaggtttttagtggctgccttcctatttgggtttacaattaagatggcaccaggaacaccgtggttatagtcagaagtttggaaaaaaaaaaaaatggtgtgtgagtagaggtaaaccattcacatccagtgaagaccacctgacattacagtccctgtatgaatgaggtcttggctattgttgagttagaaaatcttcacagaattagaaaaaactactttgaatttcatgtggaaccaaaaaagggcccctatagccaagacagtcctaagcaaaaagaacaaagctgaaagcatcatgctacctgactgcaaactatactacaaggctacaggaaccaaatcagcatggtactggtaccaaaacagagatataaaccaatggaacagaacagaggtctcagaaacatcaccacacgcctacaaccatctgatctttgacaaacctggcaaaaagcaccggggaaaggattccctatttaataaacggtgttgggaaaactggctagccatatgcagaaaactgaaacctgacccctccttacaccttatacaaaaattaactcaagatggattaaagacttaaatgtaagacctaaaaccatacaaaccctggaagaaaacctaggcaataccattcaggacataggcatgggcaaagacttcatgattaaaccaccaaaagcaatggcaatgaaagccaaaattgacaaatgggatcaaattaaactaaagagcttcttcatagcaaaagaaactatcatcagagtgaacaggcaacctacagaatgggagaaattttttgcagtctatccatctgacaaagggctaatatccagaatctacaaagaacttaaacaaatttacatgaagaaaatacacaaccccttcaaaaagtgggcaaaagatatgaacaggcacttctcaagagaagacatttatgcagccaacaaacatgaaaaaaggctcatcatcactggtcattagagaaatgcaaatcaaaatcaccacgagataccatctcacaccagttagaatggcaatcattaaaaagtcaggaaacaacagatgctagagaggatgtggagaaataggaacacttttacactgttggtgggagtgtaaattagttcagccattgtggaagacaatatggtgattcttcaaggatctagaattagaaatgccatttgacccagcaatcctattactggattcaaaggattataaatcattctactataaagacacaagcacacgtatgtttactgtagcactattcacaatagcaaagacttggaaccaacccaaatgcccatcagtgacagactggataaagaaaatgtggcacatatataccatggaatacaatgcagccataaaaaaggatgagttcatgtcctttgcagggacatggatgagactggaaaccatcattctcagcaaactaacacaagaacagaaaaccaaacaccgcatgttctcacacataagtgggagttgaacaatgagaacacatggacacagggaggagaacatcacacactgggcctgtcggagggcagggggctgggggagggatagcattaggacaactaatgtagatgacaggttgatgggtgcagcaaaccaccatggcacatgtatacctatgtaacaaacctgtacattctgcacatgtactccagaacttaaagtataagaaaaaaagaagggggaggcaggagaaaagtattaaatttatattaataaaaaaagaaatagtaaaattatgattatcagaggctgtgaggtgagaggattgaggagatgttggtcaaatggtacaaaatttcagttaggaggaataagttcaagagatccattgtatattgtggcgattagagttaataactatatattgtatacttaaaaattgctgagaattgattgaaagtgttctcaacacaaaacataagtatgtgaagtaatacatatgttaaatagcttgatttagccattctataatgtatatacatgtatcaaaacattgttttacaccataaatatatactgtttttccttgttgattaaaaataaataagttgttgaatacatgaaaaaaaaaagaaggaaaatgttcataatgaaaactgggcgtgaatgacaaacccaaaatgattgtaatatagcaacagtatcaaattcatatggcaattttgttttagcccaacaatctcatttatcatattaaattaatgattataatccaaattgtactattttcacagggctttctgtttaactttaaatgtgtttttgttttatagcataggataagcactataaggtatgatgcttatagcaagttttatgtttgtatatattttaaaaatattggaatacagtattttaagtcaatgctggagttgattaaagtcttacttttccctttaaattccaagtcagttatgagaaacaatgataaaaaatgagcttttatccccagatttatagtccttgaactagatttcatgttcatttatgttgcttcctcaaaaaacccatgtaaattggatgggctaggtcaacaagctagtgatcatccttcatttgctccatggagttagacagatgttggtgcaaaattcttacaccgcctgcccattcctaaatgtgcgaacttaggcaagttacttattttgtctttattttggcacccccatgtgtgaactgagaataagaatacttagcaggattgttttgaaaaatagtaatatataatattataataagatgattaatattaaaaatagccctcatttggataactatttttggcaccaactcccaggcaacttttcacagcgtgaatagttagccctctttgaacaagttactaagtaccagccactttaaatacataatctcatttaatcctaacaaattactagtatcattcctattttgcagatgaaaaacaggccaagacaggttcagttgacaagaaattgcacagatctaaatgcagactggacttactgtgaatcccaaattttccctcaccatgttattttgtccaaaatgaaactaaaatgcttggcatagatctagacttttgtaggcactcagtaaatattatttccactctgaagaaaacgattcatgtttcatttcgcttctcatcagaggtaccacgaacagaatatcacccttttatgataaatcactcaaattgcagacttttgatccctaaagttcaagagtgaaaaggtataaatatgaagaaatttcatgttaggtcacgggatgggaaaagatgcttatgtcaggatttaccatttctagtgaccagcacctagcagattgctggtttattagatttatttattattttcattgtttccttcagatgactcctatttatctgattgtagagtaacctctgagctttattagctagaattttattttccacagtgtagtccaaacaactttttcttggcaaaatataggaccccattagaaccattaggactaaaatgtcagctctcgtgatagaagagaactgaggccactgtcttttcatggctttctctaataccttttctgctgaagtcttggttacaatgctaagaatgacataaccccttagttatgtgaggtgtactagctgattcaataagcctttatgaaagttttattttcagctataaggtcaaggttgtattagcgctacaagctaagcagaatttataaggcaaatttcagtttcctccaaaaaggcagcccttatgtataggaaacagaaatatcatctatttgatactcagcagtgcctcttatgattttcatgagcagcagaatgtcttttattgacaaaagccatacaaaaaaaaccagaattacatcttttttgttccaaaatagaattaaaaatgatagtctatcaatcaaattagccatgatggattttattttattctaacgtcttatgctcatttgtagaccagagcaaccatctcttctaactctgcaaatcttccttggttctgctatgcaacttagggctcatttaggtggtttagcacagggctttctggccctaagccgagactggcaccaaataagcttgcctgacactttatagggtgtgatgaacagtccagagctcccaggcaactttccacagcatgatttggaatctacttgcaattacatatggctagtggagctgcatctggagaagcctaatcagaatttgtcttccatttagtagaaataaaacgagcccactcattgtgtcagaattcatctttacactacagaatgagcaataacctaaaatcaatgccaatctcctggatatggtgtatatacttgagaaagtgttctgcagaatgttttctacattactttcatcactgtgttttctatttcagggcccactcttcctaagacccatgtgaaaacagcctcccttgggttggctggaaaagcaagatcccctttgcttcctgtgtctgtgccaacagcccctgaagtgtctgaggagagccacaaaccaacagaggattcagccaatgtaagggcatctttaaaattcatgcttcatcaagggacagattgactggcgctgtgtaatagcatctaaaccaatgagtactgtccattcaccccaggccaccccaggccaccccaggccattgttgttcttattgttgtttgttcctttgttttcctgcacttaaatatgaagaggaaataaaagctatgaaaaaaaattatgtcagagacttagttatgtaaaaaagttgattcttaaggacagtcttagaaatatgaccagatagctacagaacgtgtggttttacacccatatatgtacataatatatacatatacacatgatatacacatggatacgtgtgtgtgtgtgtgtgtgtgtgtgtgtgtgtgtgtgtttcttttcaataggaagaaataccttggcattcttggaaataaataagactagactatataactcttcttcttccttttttttttttattttaagagacagggtcttgctgtgttgcccaggctagagtgtagtggctattcacaggcacaatcatagtgcactacagccctgaacttcttagctcaagcagttctcctgcctcaatttcccaagtagctaagactataggtgcacattactacaccaacttatacagttattctctaaaattaaaaaaatatagtgacaaaaagctatattatgagggctttttgaagttattatatatgttacttctgaaatcataaaataccagaaatatagatttgtgaaggaaaaaatataaaataaaaaaattgaaggagtttaagtaatacaaaaaggaaatgacgtaattaaaaaataagaagggaaagtttatttaaagacagaaaaagttttactaaggaaataagctaaaaagggttccagttagaaaactcagaaggaacatcaatagagaaggggaaaaaatcagaattttaagaaaaaaaaaacatttatcccgaaaatgcactgtaaaggagattcaaaaagacattgcctaaaggcagctatttatagtacactttagttgtttctgaatataattcaagagaaaacatttaaaagaagcctaaggaattaacatatcagatatcttgaaaaatcagggcactagaagagaaaaaagatgaaaagagcagattaaaattctattttgttattacatttggatcttttttaagcataaattatgaaatgaaaataatctgccacccttccaactagcttgttttcttcatgcataaatgaagtcttctgcaaaatttgcaaataatgtattgaaaaataaatttataacaatatcaaggaataagtaggtaacatttaatcagtcctctgtaagcaatgcaactaccaggtcttttataaaaattatactttcttttgatatctggttgttgttaaaaacaaagaatcatttcatttgaatgaagaacaatacatttttcttgacttaattttttttcaatactacaaacaataaaatattttaacgacatagagatcagggaagctgagtatgtgagtgtgtctgtaaatgttttggcagatgagtgttatctacttaacatgcttttcaaagattcaaatttataagactctaatgcacttttgtgcgttagaatatagctgtttacgtcaatatctgtttaggatcaaggtttgtggccacatctcaaataaaatcaaacttctaagtttacatgaagtatctcatctcataaagaatcatgtcaggtaggcctatttttacattaaaggttgactctaaagaatggcagccaaattaaaatattaaactttattaatattaaaagcagtaagaaacacatattaaaggaaataaagaggacaaatagtgtagaccaacatttgcctatgaaaacataatgtgtaattttaaattgactagaagctacattaaaagatgtaaaaataaataggtgaagttaataccttttatctaacccaatatttccaaaatattatcatctcaacatgcaataaatatttaaaattgtcaataatgtattttactttttttgtactgttccaaaactggtacgtattttttcatgtaaaacacatttcaggtgagactaggcacattttaagaatataatagttacatgtggctagtggttgccgtattatacaatgaaatctagacagtttgagaacgacaaccagacaatgaaaacaacattttggaaatgagttgcctagtaatcccctcacttcaacttctctctctctctctctctctctctctctctcacacacacacacacacacacacacacacacacacacacacacattgtatgtatataaacaggcttttagccaaattggaaacttttcagtcctctattaagccctgaagattgggtagtgtatgcccgaatcattcactgacatgctgagatttctataggaagctcatacattaataccatacattttgagctgttttttcaatggctggagtagctttgtgcctacctcccacccatgcaaattctatcaatgctctcttgagatcaagggtacttatttggcaagattagatatacatctctgatcatagtgctaaggaatgtgtcttggcctatgcagagctagaaatcatggctcaggcctcattggttcaatcatttaatcaatggaatgcgctagccaagaataataagtagaacatctgtataagtcaactaatatgttcaagaaaggaaaaaaagaaaactaacatttactgaacacttaccactaggcagccctgacttgttgaatcctcctaactcctcaaaagacaaacttgttattctcatttcacaaataagaagactaactcaaataaaatgtgcaagtatataaaaggactgggattcaaatcagtttcacatcttatttccccatctggctaactatcaaaactacctgggaatttttcttttaattaggatgtctaggttcttcccataccttctgaaacagaattcctaagcctagcgacctggtatttgtggtaactagtaattctattacttactgacatgataatagtgacttatagtgagtgagtttacagagtgaattagtgacagttcactaggcattctggagttcaacctcttcttttatccaccattcaaattgtcccaaaaaggattgactgtggtttggggcatgaattttgtttccacacacaaactaaagtcataatctccagacgtttcattggccaaggcaaagcccgctgagttctcacatacaaaaaaaaatgtatctatgtcatgatacagagaaaaaatattctgttcatatcttggttaacctagtaagaggaacaggagctaatgtattgaatatctaccatatgccagaccctatcatgggtactaaacatgttacaggaggctcagaatagcctatgaaatagatgtcattatcattttatagatgaagaaaattacgtatcagagaggtgcactcacttgtctaagaccacacagctaataattgggagaacttgatttgaaacccaatctttttgactctgaaacatcttccttgtcacaggtggagatggagtgggtgaaacaatatgcaatctcttattatccccttttattaccagcatcttcattcagtgagtatattccaaggacagccctggctgtggtctcctaggtcagacttgggaatacgtagcaccccaactagctgtggccccggccttcataaaagaaatggatcaatatttgttactaactcttggctctcattctctttataggtgtatgaacaggatgatctgagtgaacaaatggcaagtttggaaggactcatgaagcagcttaatgccatcacaggctcagccttttaacatgtatttctgaatggatgaggtgaattttccgggaactttgcagcataccaattacccataaacagcacacctgtgtccaagaactctaaccagtgtacaggtcacccatcaggaccactcagttaaggaagatcctgaagcagttcagaaggaataagcattccttctttcacaggcatcaggaattgtcaaatgatgattatgagttccctaaacaaaagcaaagatgcattttcactgcaatgtcaaagtttaagctgctagaatagtcctgggcctttgtcactgcagtgaccacactgtcataactaatacctatgttttcctttgtcaaggcctgttgtttaatgtgtaggtctagtcttacaaaatgcaagtgcattatttaagcctgtaccatgccatggcaaaccagtgcaagctcactattttgttttcaacttaaacatacaaagcacccatgggaatctctcatgccatagcaccaaaggattggatgttttccttacagcacaaaaagtaaatagtaaacaaacaaaaggcagagaatgcttatgtttgtaactcagtcattcatcttgcacaagtggtggatattagtgagtggctaaaaattcacctattttggcaagtatttgtaaatccacccttggttaatatgtatgtctggagtccaggaatataaaaatctgcaactagtggcattctgccagcagcagtacatttctggaaagaggatataatatgcaatcttct

SEQ ID NO: 81 - DNA, 225 bp, Homo sapiens
atgcggggaggaaatgtcctcctcgactgctccgcggagtccgaccgaggagttccagtgatcaagtggaagaaagatggcattcatctggccttgggaatggatgaaaggaagcagcaactttcaaatgggtctctgctggaaattgcagggagaaggcttacctatggtaaatcgccaatgggggaagaatctacagatgtggtcaacacaggtcagggctgc

SEQ ID NO: 82 - protein, 75 aa, Homo sapiens
MRGGNVLLDCSAESDRGVPVIKWKKDGIHLALGMDERKQQLSNGSLLEIAGRRLTYGKSPMGEESTDVVNTGQGC

SEQ ID NO: 83 - DNA, 1064 bp, Homo sapiens
gttccaggttttcaaattaaagctttcacagcactgcgcttcctctcagaaccttctgatgccgtcacaatgcggggaggaaatgtcctcctcgactgctccgcggagtccgaccgaggagttccagtgatcaagtggaagaaagatggcattcatctggccttgggaatggatgaaaggaagcagcaactttcaaatgggtctctgctgatacaaaacatacttcattccagacaccacaagccagatgagggactttaccaatgtgaggcatctttaggagattctggctcaattattagtcggacagcaaaagttgcagtagcaggaccactgaggttcctttcacagacagaatctgtcacagccttcatgggagacacagtgctactcaagtgtgaagtcattggggagcccatgccaacaatccactggcagaagaaccaacaagacctgactccaatcccaggtgactcccgagtggtggtcttgccctctggagcattgcagatcagccgactccaaccgggggacattggaatttaccgatgctcagctcgaaatccagccagctcaagaacaggaaatgaagcagaagtcagaattttatcagatccaggactgcatagacagctgtattttctgcaaagaccatccaatgtagtagccattgaaggaaaagatgctgtcctggaatgttgtgtttctggctatcctccaccaagttttacctggttacgaggcgaggaagtcatccaactcaggtctaaaaagtattctttattgggtggaagcaacttgcttatctccaatgtgacagatgatgacagtggaatgtatacctgtgttgtcacatataaaaatgagaatattagtgcctctgcagagctcacagtcttggtaatcatcgataaagtattggtggacaccttttgggtacaaggattgcactaggttctgggaagactacagaaacatctgaaacctggcttcagtgggcttcgtataattacaattcgtaaaatcagttggcctaatactgtctgaataaacttttatttaaa

SEQ ID NO: 84 - protein, 292 aa, Homo sapiens
MRGGNVLLDCSAESDRGVPVIKWKKDGIHLALGMDERKQQLSNGSLLIQNILHSRHHKPDEGQCEASLGDSGSIISRTAKVAVAGPLRFLSQTESVTAFMGDTVLLKCEVIGEPMPTIHWQKNQQDLTPIPGDSRVVVLPSGALQISRLQPGDIGIYRCSARNPASSRTGNEAEVRILSDPGLHRQLYFLQRPSNVVAIEGKDAVLECCVSGYPPPSFTWLRGEEVIQLRSKKYSLLGGSNLLISNVTDDDSGMYTCVVTYKNENISASAELTVLVIIDKVLVDTFWVQGLH

SEQ ID NO: 85 - DNA, 5013 bp, Homo sapiens
gttccaggttttcaaattaaagctttcacagcactgcgcttcctctcagaaccttctgatgccgtcacaatgcggggaggaaatgtcctcctcgactgctccgcggagtccgaccgaggagttccagtgatcaagtggaagaaagatggcattcatctggccttgggaatggatgaaaggaagcagcaactttcaaatgggtctctgctgatacaaaacatacttcattccagacaccacaagccagatgagggactttaccaatgtgaggcatctttaggagattctggctcaattattagtcggacagcaaaagttgcagtagcaggaccactgaggttcctttcacagacagaatctgtcacagccttcatgggagacacagtgctactcaagtgtgaagtcattggggagcccatgccaacaatccactggcagaagaaccaacaagacctgactccaatcccaggtgactcccgagtggtggtcttgccctctggagcattgcagatcagccgactccaaccgggggacattggaatttaccgatgctcagctcgaaatccagccagctcaagaacaggaaatgaagcagaagtcagaattttatcagatccaggactgcatagacagctgtattttctgcaaagaccatccaatgtagtagccattgaaggaaaagatgctgtcctggaatgttgtgtttctggctatcctccaccaagttttacctggttacgaggcgaggaagtcatccaactcaggtctaaaaagtattctttattgggtggaagcaacttgcttatctccaatgtgacagatgatgacagtggaatgtatacctgtgttgtcacatataaaaatgagaatattagtgcctctgcagagctcacagtcttggttccgccatggtttttaaatcatccttccaacctgtatgcctatgaaagcatggatattgagtttgaatgtacagtctctggaaagcctgtgcccactgtgaattggatgaagaatggagatgtggtcattcctagtgattattttcagatagtgggaggaagcaacttacggatacttggggtggtgaagtcagatgaaggcttttatcaatgtgtggctgaaaatgaggctggaaatgcccagaccagtgcacagctcattgtccctaagcctgctatcccaagctccagtgtcctcccttcggctcccagagatgtggtccctgtcttggtttccagccgatttgtccgtctcagctggcgcccacctgcagaagcgaaagggaacattcaaactttcacggtctttttctccagagaaggtgacaacagggaacgagcattgaatacaacacagcctgggtcccttcagctcactgtgggaaacctgaagccagaagccatgtacacctttcgagttgtggcttacaatgaatggggaccgggagagagttctcaacccatcaaggtggccacacagcctgagttgcaagttccagggccagtagaaaacctgcaagctgtatctacctcacctacctcaattcttattacctgggaaccccctgcctatgcaaacggtccagtccaaggttacagattgttctgcactgaggtgtccacaggaaaagaacagaatatagaggttgatggactatcttataaactggaaggcctgaaaaaattcaccgaatatagtcttcgattcttagcttataatcgctatggtccgggcgtctctactgatgatataacagtggttacactttctgacgtgccaagtgccccgcctcagaacgtctccctggaagtggtcaattcaagaagtatcaaagttagctggctgcctcctccatcaggaacacaaaatggatttattaccggctataaaattcgacacagaaagacgacccgcaggggtgagatggaaacactggagccaaacaacctctggtacctattcacaggactggagaaaggaagtcagtacagtttccaggtgtcagccatgacagtcaatggtactggaccaccttccaactggtatactgcagagactccagagaatgatctagatgaatctcaagttcctgatcaaccaagctctcttcatgtgaggccccagactaactgcatcatcatgagttggactcctcccttgaacccaaacatcgtggtgcgaggttatattatcggttatggcgttgggagcccttacgctgagacagtgcgtgtggacagcaagcagcgatattattccattgagaggttagagtcaagttcccattatgtaatctccctaaaagcttttaacaatgccggagaaggagttcctctttatgaaagtgccaccaccaggtctataaccgatcccactgacccagttgattattatcctttgcttgatgatttccccacctcggtcccagatctctccacccccatgctcccaccagtaggtgtacaggctgtggctcttacccatgatgctgtgagggtcagctgggcagacaactctgtccctaagaaccaaaagacgtctgaggtgcgactttacaccgtccggtggagaaccagcttttctgcaagtgcaaaatacaagtcagaagacacaacatctctaagttacacagcaacaggcctcaaaccaaacacaatgtatgaattctcggtcatggtaacaaaaaacagaaggtccagtacttggagcatgactgcacatgccaccacgtatgaagcagcccccacctctgctcccaaggacttgacagtcattactagggaagggaagcctcgtgccgtcattgtgagttggcagcctcccttggaagccaatgggaaaattactgcttacatcttattttataccttggacaagaacatcccaattgatgactggattatggaaacaatcagtggtgataggcttactcatcaaatcatggatctcaaccttgatactatgtattactttcgaattcaagcacgaaattcaaaaggagtggggccactctctgatcctatcctcttcaggactctgaaagtggaacaccctgacaaaatggctaatgaccaaggtcgtcatggagatggaggttattggccagttgatactaatttgattgatagaagcaccctaaatgagccgccaattggacaaatgcaccccccgcatggcagtgtcactcctcagaagaacagcaacctgcttgtgatcattgtggtcaccgttggtgtcatcacagtgctggtagtggtcatcgtggctgtgatttgcacccgacgctcttcagcccagcagagaaagaaacgggccacccacagtgctggcaaaaggaagggcagccagaaggacctccgaccccctgatctttggatccatcatgaagaaatggagatgaaaaatattgaaaagccatctggcactgaccctgcaggaagggactctcccatccaaagttgccaagacctcacaccagtcagccacagccagtcagaaacccaactgggaagcaaaagcacctctcattcaggtcaagacactgaggaagcagggagctctatgtccactctggagaggtcgctggctgcacgccgagccccccgggccaagctcatgattcccatggatgcccagtccaacaatcctgctgtcgtgagcgccatcccggtgccaacgctagaaagtgcccagtacccaggaatcctcccgtctcccacctgtggatatccccacccgcagttcactctccggcctgtgccattcccaacactctcagtggaccgaggtttcggagcaggaagaacagtgagtgaaggaccaactacccaacaaccacctatgctgcccccatctcagcctgagcattctagcagcgaggaggcaccaagcagaaccatccccacagcttgtgttcgaccaactcacccactccgcagctttgctaatcctttgctacctccaccaatgagtgcaatagaaccgaaagtcccttacacaccacttttgtctcagccagggcccactcttcctaagacccatgtgaaaacagcctcccttgggttggctggaaaagcaagatcccctttgcttcctgtgtctgtgccaacagcccctgaagtgtctgaggagagccacaaaccaacagaggattcagccaatgtgtatgaacaggatgatctgagtgaacaaatggcaagtttggaaggactcatgaagcagcttaatgccatcacaggctcagccttttaacatgtatttctgaatggatgaggtgaattttccgggaactttgcagcataccaattacccataaacagcacacctgtgtccaagaactctaaccagtgtacaggtcacccatcaggaccactcagttaaggaagatcctgaagcagttcagaaggaataagcattccttctttcacaggcatcaggaattgtcaaatgatgattatgagttccctaaacaaaagcaaagatgcattttcactgcaatgtcaaagtttaagctgctagaatagtcctgggcctttgtcactgcagtgaccacactgtcataactaatacctatgttttcctttgtcaaggcctgttgtttaatgtgtaggtctagtcttacaaaatgcaagtgcattatttaagcctgtaccatgccatggcaaaccagtgcaagctcactattttgttttcaacttaaacatacaaagcacccatgggaatctctcatgccatagcaccaaaggattggatgttttccttacagcacaaaaagtaaatagtaaacaaacaaaaggcagagaatgcttatgtttgtaactcagtcattcatcttgcacaagtggtggatattagtgagtggctaaaaattcacctattttggcaagtatttgtaaatccacccttggttaatatgtatgtctggagtccaggaatataaaaatctgcaactagtggcattctgccagcagcagtacatttctggaaagaggatataatatgcaatcttct

SEQ ID NO: 86 - protein, 1386 aa, Homo sapiens
MRGGNVLLDCSAESDRGVPVIKWKKDGIHLALGMDERKQQLSNGSLLIQNILHSRHHKPDEGQCEASLGDSGSIISRTAKVAVAGPLRFLSQTESVTAFMGDTVLLKCEVIGEPMPTIHWQKNQQDLTPIPGDSRVVVLPSGALQISRLQPGDIGIYRCSARNPASSRTGNEAEVRILSDPGLHRQLYFLQRPSNVVAIEGKDAVLECCVSGYPPPSFTWLRGEEVIQLRSKKYSLLGGSNLLISNVTDDDSGMYTCVVTYKNENISASAELTVLVPPWFLNHPSNLYAYESMDIEFECTVSGKPVPTVNWMKNGDVVIPSDYFQIVGGSNLRILGVVKSDEGFYQCVAENEAGNAQTSAQLIVPKPAIPSSSVLPSAPRDVVPVLVSSRFVRLSWRPPAEAKGNIQTFTVFFSREGDNRERALNTTQPGSLQLTVGNLKPEAMYTFRVVAYNEWGPGESSQPIKVATQPELQVPGPVENLQAVSTSPTSILITWEPPAYANGPVQGYRLFCTEVSTGKEQNIEVDGLSYKLEGLKKFTEYSLRFLAYNRYGPGVSTDDITVVTLSDVPSAPPQNVSLEVVNSRSIKVSWLPPPSGTQNGFITGYKIRHRKTTRRGEMLEPNNLWYLFTGLEKGSQYSFQVSAMTVNGTGPPSNWYTAETPENDLDESQVPDQPSSLHVRPQTNCIIMSWTPPLNPNIVVRGYIIGYGVGSPYAETVRVDSKQRYYSIERLESSSHYVISLKAFNNAGEGVPLYESATTRSITDPTDPVDYYPLLDDFPTSVPDLSTPMLPPVGVQAVTHDAVRVSWADNSVPKNQKTSEVRLYTVRWRTSFSASAKYKSEDTTSLSYTATGLKPNTMYEFSVMVTKNRRSSTWSMTAHATTYEAAPTSAPKDLTVITREGKPRAVIVSWQPPLEANGKITAYILFYTLDKNIPIDDWIMISGDRLTHQIMDLNLDTMYYFRIQARNSKGVGPLSDPILFRTLKVEHPDKMANDQGRHGDGGYWPVDTNLIDRSTLNEPPIGQMHPPHGSVTPQKNSNLLVIIVVTVGVITVLVVVIVAVICTRRSSAQQRKKRATHSAGKRKGSQKDLRPPDLWIHHEEMEMKNIEKPSGTDPAGRDSPIQSCQDLTPVSHSQSETQLGSKSTSHSGQDTEEAGSSMSTLERSLAARRAPRAKLMIPMDAQSNNPAVVSAIPVPTLESAQYPGILPSPTCGYPHPQFTLRPVPFPTLSVDRGFGAGRTVSEGPTTQQPPMLPPSQPEHSSSEEAPSRTIPTACVRPTHPLRSFANPLLPPPMSAIEPKVPYTPLLSQPGPTLPKTHVKTASLGLAGKARSPLLPVSVPTAPEVSEESHKPTEDSANVYEQDDLSEQMASLEGLMKQLNAITGSAF

SEQ ID NO: 87 - DNA, 5019 bp, Homo sapiens
gttccaggttttcaaattaaagctttcacagcactgcgcttcctctcagaaccttctgatgccgtcacaatgcggggaggaaatgtcctcctcgactgctccgcggagtccgaccgaggagttccagtgatcaagtggaagaaagatggcattcatctggccttgggaatggatgaaaggaagcagcaactttcaaatgggtctctgctgatacaaaacatacttcattccagacaccacaagccagatgagggactttaccaatgtgaggcatctttaggagattctggctcaattattagtcggacagcaaaagttgcagtagcaggaccactgaggttcctttcacagacagaatctgtcacagccttcatgggagacacagtgctactcaagtgtgaagtcattggggagcccatgccaacaatccactggcagaagaaccaacaagacctgactccaatcccaggtgactcccgagtggtggtcttgccctctggagcattgcagatcagccgactccaaccgggggacattggaatttaccgatgctcagctcgaaatccagccagctcaagaacaggaaatgaagcagaagtcagaattttatcagatccaggactgcatagacagctgtattttctgcaaagaccatccaatgtagtagccattgaaggaaaagatgctgtcctggaatgttgtgtttctggctatcctccaccaagttttacctggttacgaggcgaggaagtcatccaactcaggtctaaaaagtattctttattgggtggaagcaacttgcttatctccaatgtgacagatgatgacagtggaatgtatacctgtgttgtcacatataaaaatgagaatattagtgcctctgcagagctcacagtcttggttccgccatggtttttaaatcatccttccaacctgtatgcctatgaaagcatggatattgagtttgaatgtacagtctctggaaagcctgtgcccactgtgaattggatgaagaatggagatgtggtcattcctagtgattattttcagatagtgggaggaagcaacttacggatacttggggtggtgaagtcagatgaaggcttttatcaatgtgtggctgaaaatgaggctggaaatgcccagaccagtgcacagctcattgtccctaagcctgctatcccaagctccagtgtcctcccttcggctcccagagatgtggtccctgtcttggtttccagccgatttgtccgtctcagctggcgcccacctgcagaagcgaaagggaacattcaaactttcacggtctttttctccagagaaggtgacaacagggaacgagcattgaatacaacacagcctgggtcccttcagctcactgtgggaaacctgaagccagaagccatgtacacctttcgagttgtggcttacaatgaatggggaccgggagagagttctcaacccatcaaggtggccacacagcctgagttgcaagttccagggccagtagaaaacctgcaagctgtatctacctcacctacctcaattcttattacctgggaaccccctgcctatgcaaacggtccagtccaaggttacagattgttctgcactgaggtgtccacaggaaaagaacagaatatagaggttgatggactatcttataaactggaaggcctgaaaaaattcaccgaatatagtcttcgattcttagcttataatcgctatggtccgggcgtctctactgatgatataacagtggttacactttctgacgtgccaagtgccccgcctcagaacgtctccctggaagtggtcaattcaagaagtatcaaagttagctggctgcctcctccatcaggaacacaaaatggatttattaccggctataaaattcgacacagaaagacgacccgcaggggtgagatggaaacactggagccaaacaacctctggtacctattcacaggactggagaaaggaagtcagtacagtttccaggtgtcagccatgacagtcaatggtactggaccaccttccaactggtatactgcagagactccagagaatgatctagatgaatctcaagttcctgatcaaccaagctctcttcatgtgaggccccagactaactgcatcatcatgagttggactcctcccttgaacccaaacatcgtggtgcgaggttatattatcggttatggcgttgggagcccttacgctgagacagtgcgtgtggacagcaagcagcgatattattccattgagaggttagagtcaagttcccattatgtaatctccctaaaagcttttaacaatgccggagaaggagttcctctttatgaaagtgccaccaccaggtctataaccgatcccactgacccagttgattattatcctttgcttgatgatttccccacctcggtcccagatctctccacccccatgctcccaccagtaggtgtacaggctgtggctcttacccatgatgctgtgagggtcagctgggcagacaactctgtccctaagaaccaaaagacgtctgaggtgcgactttacaccgtccggtggagaaccagcttttctgcaagtgcaaaatacaagtcagaagacacaacatctctaagttacacagcaacaggcctcaaaccaaacacaatgtatgaattctcggtcatggtaacaaaaaacagaaggtccagtacttggagcatgactgcacatgccaccacgtatgaagcagcccccacctctgctcccaaggacttgacagtcattactagggaagggaagcctcgtgccgtcattgtgagttggcagcctcccttggaagccaatgggaaaattactgcttacatcttattttataccttggacaagaacatcccaattgatgactggattatggaaacaatcagtggtgataggcttactcatcaaatcatggatctcaaccttgatactatgtattactttcgaattcaagcacgaaattcaaaaggagtggggccactctctgatcctatcctcttcaggactctgaaagtggaacaccctgacaaaatggctaatgaccaaggtcgtcatggagatggaggttattggccagttgatactaatttgattgatagaagcaccctaaatgagccgccaattggacaaatgcaccccccgcatggcagtgtcactcctcagaagaacagcaacctgcttgtgatcattgtggtcaccgttggtgtcatcacagtgctggtagtggtcatcgtggctgtgatttgcacccgacgctcttcagcccagcagagaaagaaacgggccacccacagtgctggcaaaaggaagggcagccagaaggacctccgaccccctgatctttggatccatcatgaagaaatggagatgaaaaatattgaaaagccatctggcactgaccctgcaggaagggactctcccatccaaagttgccaagacctcacaccagtcagccacagccagtcagaaacccaactgggaagcaaaagcacctctcattcaggtcaagacactgaggaagcagggagctctatgtccactctggagaggtcgctggctgcacgccgagccccccgggccaagctcatgattcccatggatgcccagtccaacaatcctgctgtcgtgagcgccatcccggtgccaacgctagaaagtgcccagtacccaggaatcctcccgtctcccacctgtggatatccccacccgcagttcactctccggcctgtgccattcccaacactctcagtggaccgaggtttcggagcaggaagaagtcagtcagtgagtgaaggaccaactacccaacaaccacctatgctgcccccatctcagcctgagcattctagcagcgaggaggcaccaagcagaaccatccccacagcttgtgttcgaccaactcacccactccgcagctttgctaatcctttgctacctccaccaatgagtgcaatagaaccgaaagtcccttacacaccacttttgtctcagccagggcccactcttcctaagacccatgtgaaaacagcctcccttgggttggctggaaaagcaagatcccctttgcttcctgtgtctgtgccaacagcccctgaagtgtctgaggagagccacaaaccaacagaggattcagccaatgtgtatgaacaggatgatctgagtgaacaaatggcaagtttggaaggactcatgaagcagcttaatgccatcacaggctcagccttttaacatgtatttctgaatggatgaggtgaattttccgggaactttgcagcataccaattacccataaacagcacacctgtgtccaagaactctaaccagtgtacaggtcacccatcaggaccactcagttaaggaagatcctgaagcagttcagaaggaataagcattccttctttcacaggcatcaggaattgtcaaatgatgattatgagttccctaaacaaaagcaaagatgcattttcactgcaatgtcaaagtttaagctgctagaatagtcctgggcctttgtcactgcagtgaccacactgtcataactaatacctatgttttcctttgtcaaggcctgttgtttaatgtgtaggtctagtcttacaaaatgcaagtgcattatttaagcctgtaccatgccatggcaaaccagtgcaagctcactattttgttttcaacttaaacatacaaagcacccatgggaatctctcatgccatagcaccaaaggattggatgttttccttacagcacaaaaagtaaatagtaaacaaacaaaaggcagagaatgcttatgtttgtaactcagtcattcatcttgcacaagtggtggatattagtgagtggctaaaaattcacctattttggcaagtatttgtaaatccacccttggttaatatgtatgtctggagtccaggaatataaaaatctgcaactagtggcattctgccagcagcagtacatttctggaaagaggatataatatgcaatcttct

SEQ ID NO: 88 - protein, 1388 aa, Homo sapiens
MRGGNVLLDCSAESDRGVPVIKWKKDGIHLALGMDERKQQLSNGSLLIQNILHSRHHKPDEGQCEASLGDSGSIISRTAKVAVAGPLRFLSQTESVTAFMGDTVLLKCEVIGEPMPTIHWQKNQQDLTPIPGDSRVVVLPSGALQISRLQPGDIGIYRCSARNPASSRTGNEAEVRILSDPGLHRQLYFLQRPSNVVAIEGKDAVLECCVSGYPPPSFTWLRGEEVIQLRSKKYSLLGGSNLLISNVTDDDSGMYTCVVTYKNENISASAELTVLVPPWFLNHPSNLYAYESMDIEFECTVSGKPVPTVNWMKNGDVVIPSDYFQIVGGSNLRILGVVKSDEGFYQCVAENEAGNAQTSAQLIVPKPAIPSSSVLPSAPRDVVPVLVSSRFVRLSWRPPAEAKGNIQTFTVFFSREGDNRERALNTTQPGSLQLTVGNLKPEAMYTFRVVAYNEWGPGESSQPIKVATQPELQVPGPVENLQAVSTSPTSILITWEPPAYANGPVQGYRLFCTEVSTGKEQNIEVDGLSYKLEGLKKFTEYSLRFLAYNRYGPGVSTDDITVVTLSDVPSAPPQNVSLEVVNSRSIKVSWLPPPSGTQNGFITGYKIRHRKTTRRGEMLEPNNLWYLFTGLEKGSQYSFQVSAMTVNGTGPPSNWYTAETPENDLDESQVPDQPSSLHVRPQTNCIIMSWTPPLNPNIVVRGYIIGYGVGSPYAETVRVDSKQRYYSIERLESSSHYVISLKAFNNAGEGVPLYESATTRSITDPTDPVDYYPLLDDFPTSVPDLSTPMLPPVGVQAVTHDAVRVSWADNSVPKNQKTSEVRLYTVRWRTSFSASAKYKSEDTTSLSYTATGLKPNTMYEFSVMVTKNRRSSTWSMTAHATTYEAAPTSAPKDLTVITREGKPRAVIVSWQPPLEANGKITAYILFYTLDKNIPIDDWIMISGDRLTHQIMDLNLDTMYYFRIQARNSKGVGPLSDPILFRTLKVEHPDKMANDQGRHGDGGYWPVDTNLIDRSTLNEPPIGQMHPPHGSVTPQKNSNLLVIIVVTVGVITVLVVVIVAVICTRRSSAQQRKKRATHSAGKRKGSQKDLRPPDLWIHHEEMEMKNIEKPSGTDPAGRDSPIQSCQDLTPVSHSQSETQLGSKSTSHSGQDTEEAGSSMSTLERSLAARRAPRAKLMIPMDAQSNNPAVVSAIPVPTLESAQYPGILPSPTCGYPHPQFTLRPVPFPTLSVDRGFGAGRSQSVSEGPTTQQPPMLPPSQPEHSSSEEAPSRTIPTACVRPTHPLRSFANPLLPPPMSAIEPKVPYTPLLSQPGPTLPKTHVKTASLGLAGKARSPLLPVSVPTAPEVSEESHKPTEDSANVYEQDDLSEQMASLEGLMKQLNAITGSAF

SEQ ID NO: 89 - DNA, 10776 bp, Mus musculus
  misc_feature (1)...(10776): n = A,T,C or G
aaagttacagtctgaagcttgccttcccctctgactcctgtgtctcctctcctgcagcatggtgtggctccccagagttccctgtgtggcagctgtgatcctgttgctgacagtgctgagccctccagtggctttggtcagagactccagacgtaagtgcacacctcaggtgctgggatgctcggggtcggggaaggaaggagctaacattctcactgtccaggccaagtccctcggaactattgatatcttctgtgagcatgcacagtcctcacatgaactctaaactatgtccccaaacagaagcctggatgtttgtgctctcagatctgtgtgagaggccgctgggtatcagccattgcttttcaagtttctcccagtaacatctacacctgcgtcatattcctttagggccctgagaagatcgatgaatcatgatgttaaattaacttctgggacaggccctgtcttcactgtgttgagataaagccagacaaagtggtttctctttaaaaatagaacttcctatgtgtgtttctattctactttttatgtatgttttctgttgttttgggccaaacagtaaaatattgatatctaatcagaagatttctgtggaggtgtcatagagtcaaggggcagtgaggtcatcacagggagattcctgtgcaccctctgcaggctgtgaggccactgccacacattgctacctgtgaggcgtaacccagggcttcctttttctctctcactgactccagtgcttgtgtagcctgttcccatgcagaacctctgctgggtggtggttagtgtttccccttgtcctgggcgcacacagcagctaatgctgagggtcttagatctggaaatgggcatctgtgggttattctaaagaactggaagtcccttctgagaccccggggcaggttagactggttcagtgttcatgttctgaacatgtctgcatattgtttttctttaacattctctgccctgagcccatgaaaaggacctgacttctctttgcattgtatgatcccttcctagcttcatgacccacatatacatcacacacagaaaaatcaaagtctgtgctatgcacatgggagataaaagatggggttatcaacactgctgaaactgtgaccctgggctggagagatggctcagtggttaaggtcactggctgtgctttcagagagcctgggctcaattcccagcactcacagggcagctcaccactgtctgaactccaggagttccaacatcttcacacagacacacatgcacacaaaatgccaatgcacataaaatgaaaataaataattaaaaaataataatctgagaccccagaatgctgggactgtgggcaagccctctgaccccttttggctttggctgcaatgtaaaatgtggaagagatgatctttttcatagagctctctgaggattgggagaaatggccatgtaaagcattagggtcctgctgccacactgtgtgcttcctctctgtaagctgttctcaaagggcacatggaagcttccagattgcctctcatctcattgccacctcccacagaccagaatcctgcccttgcatcatttgtcacagggaccattcttatgacttccagaactgtccttttttatttttttttccattttgtcttttctcctcactattgtctgtgttgtctcaaacacagggacaagtgattccatcactgaaatctctgttaaattcatgagccacagtgatgactgctgcaaatacttctcaggaaacacaccaaacttcatcctactgagcgtgaggttgataatggctggtgctcgcctttatttcagttgcttttcacaaatctcttgtacatttctgagttagattaagtgtgaagatgaaaagacgtccatctaatgtgtcgtcctctattgagactagaggaactcacatgactgactgacccaccagatcctggagacacgcccttaccttacctggggtcacatttggcatctgattttaaaacggtctggtttttgaattctctgcatctgtaattcagataacagattgtagctcagtattgggatcacggtctcaatttccagaaacttctccagttgttttctctcagtgaaaaacagacagcttccatcaactccaaggcttttgagctggggctgcttttgatcccccaagtctcatctctcattgttgccccaatgtcctgtgctctgttattcatgaactcagtgctggcatgaggtgtttgttacctcacctaagagttgctcctctactccctgtatcccctcttctgacatttgcagccaccaccctcttctggctcacatctgtgacagaacttcactttctgtccccaggatgcttcccttcccctcctgtcactcaagacttcctgttaatggaactccatcccctccccgcttcttccccaccttcacagtttaaagctctggcatggagggaggcctccgtttctcctcttagggtttccatgggcagcgcaggcctgcacagggcgggcactgaggaagatttactgtgttctgtgtggtgtgttaaggagcttgagcctgaagggtgggagggaggtgtcttctgagctggtgagtcctggtctccagcttagctccaggtggggcaggatcaggaaggggtatacccaatggctccctgtgttgctggaatacatatatatgtttgtgtgtgtgtgtgtatatatatatacatatacatatatatatatatatatatacacacacacatatgtgtatgtatgtatgtatgtatgtatgtatgtatgtatgtatgtaacaacaattaaggacaaaagaggccatgaatttgaaagagaacatggagttgtacataggaaggttcagggggaggaaaaggaacaggggaaatggttgaattatatgacaatctcaaaaataagagtcttactgggtttgaaccacannnnnnnnnnnnnnnnnnnntggggcaggatcaggaaggggtatacccaatggctccctgtgttgctggaatacatatatatatatatatatatatatatatatatatatatatatatacatatatatgtttgtgtgtgtgtgtgtgtatatatatacatacatatacatatatatatatatacacaccacacatatgtgtatgtatgtatgtatgtatgtatgtatgtatgtatgtatgtaacaacaattaaggacaaaagaggccatgaatttgaaagagaacatggagttgtacataggaaggttcagggggaggaaaaggaacaggggaaatggttgaattatatgacaatctcaaaaataagagtcttactgggtttgaaccacacttataggcaggcccctagcccagcagtagatgttccaatagaaagaaaatccagtggttttcttgcagaatttaaaaaaaattatttatttatttgccttacagagtttttgcttatatattagggtttcagattttgtctgttttattattcctttttgtttgtatgtgtgtgtctgtgtttcttatagttttttaaatcactttttgtttatttcgtcctgtttgtttgtttgatttgaggtggtcctaattgagtattttctaatgtgtaagagaaccaagtgtggctttaggtggttggagaggaggctatgaagagaatctattgtatgagaaatttttatttaaaaaccaaagcagaagaatccactgggagataaaatggccactcgacctctctgtcgcttgggaccttgaggtcatgatgaaggttaaagaaatgagggggagaggactgagggaggaggactgtccagtcccactgggaatagggggcgggttccccgagttcctccatcacttcactgggtagcacagctgtaactgtccagcctggggtggagctggggcgtgcgtccttctgccctgttagttgtggagacctcagaagtgagcagggtagaacttgggtctggtcggtcattcgggcagctgagagggactcgggcatcttgtcggcagagaagaagataattcttgtctccacagcatggtttttggaatactgtaaatctgagtgtcatttctacaacgggacgcagcgcgtgcggcttctggtaagatacttctacaacctggaggagaacctgcgcttcgacagcgacgtgggcgagttccgcgcggtgaccgagctggggcggccagacgccgagaactggaacagccagccggagttcctggagcaaaagcgggccgaggtggacacggtgtgcagacacaactatgagatctcggataaattccttgtgcggcggagaggtgagacaggacagggtggctggggcggaaccacggtgagggtggggctgtggggagcagcagaaggcggtgcgcatgtgcgcaggagccgcagggaatgctgggttccctgcagctggagccacaggcgcttttaagcagcctcttggcaggggaacggaattcatccttggtaccattaactgctgatctcctcactggcccgagcaaaaagtcaggactgcccaggacagcgacccatgagtgaaaactgcattaaacatactttcaccttaagcaggagggctaggagaggggtgggcagaggaaagtaaagctggaccccggagtggggtcgtccccaaagggagagtagcactgatggagacctacctacacggtgtgcggaaggcctcagccaagtacagttttgaatctcaggttgtgaacgacccacaacgtgaggactcccccacgttctgactcaggagaggcgacaccccaaatcacacaagaaacggtcttgctgcaaagtgcaagaggacttttatttaagagcgctcttgggcccatggtcatacaccacgcaggggtagaggactgtggcaccccgagtagctgggtaagggggtatttaaaggaagaaaccacaactcaaggaagtggggagggctttgttggaaaatacaaaagataccagttaagagtcccaaggaagtgcaaagtcacaagagtcacaaggaatacctggtaattgttcaggttatctctcaagacagtttctaagagcccctaacaatagcacatttgcatagcgggttctggcaatggtcagggtgactttctttgaatgaacactctttgaactcaggaagtgggtgggtggagaaatgtcgctatctgttttatgattagcattccttggagcattaagtcacagaggtcacattctcaagcctgggcctaaaggcccagaattttgtttttgcgttttactttttcattccccacttctacttgttagtagttctaatcttagaactagacactatctttttcctgacatacttgatcctttagggcatggtactgttgtcttaaagctaaaagccgcactgcactaatttttgttttaataaaggtgagttgtctatttaatatacatggacctataattaaaagcagaagtaaaatcaaaaggggtcttataaaggtagaaagtagggtggtcaagagtacaagataagggtctttctacccaagtctcaaggttttctgcgtggagacgtctaatgtagaacgaatctctaacttggaagagatgtggtgcttctaggtcttctggagcaggccttctggagctgcttctttgcttgctgtctcacccactcaagcgccttgagcctagagaacaaaggctgggaaagcagcatgtcagcactatgtgcagaggctatttttaaccagtggagggggccccctgtagagtaatttataggggggttagtctaaactgtccaggggtgtttctaaccctgaagagcacaaagggtaggtgagctatctaattattagcgccagtctccactgtcaatttggtaagggtctcttaatggttctattcattttctctacctgtcctgagctttggggcctgcatgcacaatgtaacttctaatcaatccccaatatcttggccagtccctgatttacctgggcaacaaagacaggtccgttattggacccaattaccttgggaagatttcttttagaaattttacctcgtcatagcacaggccttgcagcttttgactattttttctgccaagtcagagagtcctataacatagtagtaggaggacctaaccacaccttttaatttcttggcccccaggtgggtcaaataatgtccataacttgatagtgctcaggggtgtatctaaagctggtctccctgatgtcataataatctttaggcttcttgactgccaggatcattgctccttgggctgactgtttggcggttagatctgccatctgattttctttagccacagcatcttaggtctttctctgcagatggcaatgaagccatgactttcccttaacacagatgacacagtcagtcatgtgactgccctttaccaagatggctacaaagccttgatttttcccccacaacaatgatggcgagcactcttgtctttgtgctttccttgtgttttttttactgtcctcctaggacataaaaggcttggtagcaggtggcatagtcatgtttggcttgcacctcaaggtcacatcctgtctctactgtgtctaggtttgctccggtatatggtgctgttgttggcagatagctatgggcaggggaagtggatatgcccagcaatttattcttttacactgtagtgctctgcagctgtcctcccgggatgtagacatgctgccacacaggggctaggacaggcacactgaagccaatggcagtttccacactgtgcctgccactcagtgctgccaacactgcataaggacagggaggtctcatgagggtgtcaggggctgggtggtgcctagatccacatgtgtgcagtcactgaagctgggacagaggtgttgctgtagatgaagccagagctcagttccccaaaacctggatttagggaagttcagactgaagcctgtatgtctgcagtttttaaaaaatctggcattttgaatggaggcaatgtccaagaccaacctaatttagataaatgttgctgccacatcctttgggtgtctggctattgaggatttagacattgtatgtattatttgagcctttctgggacccgggggtgggctgccttctgcctgctagcctgggtagtactgtggttcatggtggggtaggctcaagtcaacggtgtttgaactctttcctgatgagaagaaaagaccaggcctttgtttgggtccttgagtggccaaggctcttggcagagtgcctgagaagtgtgtcgggccctggaggaggtagaggctgggaccgaagtggatttcctaagtctgaaagtcagggttgagatgttgtaggtccacagccgaattgcagttaatcttgggcttgcttagcttacacttctttatgcttctcataagtaaaggaagtcaggacagaaactccagcagggcaggaacttggaaacaggagctgatgcagaggccatggagagtgggttgctcctcagagcctgctcagcctgctctcttatagagcccaggacaaccatcaagggacagcacctcccacagtgggtgagtccctcccccccccatcaatcactaattaagaatatgccctaaaggcttacctacagcccaatcttgtggggcattttctaaattgaggttccctcctctcaagtgactttagctgtgtcagatcaacataaaactacccaggacagtttgtgatgttgaaacccccaaccctgattgcatgactcaaggtgtgggaccacaaccccatctgcacagctcaagatggtacgacagcttcttcactcagcttcagaagattgtaaagagatcaaccggaaataaccaaagaaaatgaaggcttctataaactaattttaatgggattccccatcccttatttacaataatgggtcatgtgaatggctgttatgacttgttgcctagaaaaaaagcacacacaaaatgaaaatggcctggcttcttcagctgggagaggatcctcgctcagcactgccatctgctgtttgtccactgctctgcatggtcagggtgcagactgcagctcagcccacaatccctgcagctcacagtctggcccctgctgatgtgactgtgaatccctgtttagccgacatgaagaagtaatgatgtcagatatggcaaagttgatttagagttttgccaaaacagatgagaaaggagtaacactcagtaagtcttcctgcctcacccaaagaactttcaccatctacagacaagaagaaacagaacccatgtgctatacacacagggtatgtgggtgtcgcttagctgttggttaaagtatcacagctgagaggagagcctgtttctctccgcctggagcttcacctccagctggtgattcctcctgagagtggagctgacagtaaattgtgaaaacagaacctgagtcctgggcgactgtagaaccttagcctgcctggatccagtctggatggatagatggaggtaggcaggcaggcaggcaggcaggcatgcaggcagcctacaaggaggacagctccaccctcatggctccttctcacctatctttctctagttgagcctacggtgactgtgtaccccacaaagacacagcccctggaacaccacaacctcctggtctgctctgtgagtgacttctaccctggcaacattgaagtcagatggttccggaatggcaaggaggagaaaacaggaattgtgtccacgggcctggtccgaaatggagactggaccttccagacactggtgatgctggagacggttcctcagagtggagaggtttacacctgccaggtggagcatcccagcctgaccgaccctgtcacggtcgagtggagtgagtggtaacttccagactctgtgaatgcccgcccgggtgggtgtggtttatccctgcctgtcagctttctccacccacacactctttccactggctttgtgctgtcctgcctttcaccatggcttacagggtaggtgcgtgaagcttctacaagcacagttgccccctgggaagcagttatgcccccatagactcatctgagcctgccagtgacataacaggtcctggaatcttcttgcagcctctgccgctagctgggttgtgttcctcctgctgctgctgctgatggacaaggagcagtgcagggtcatggctgacctcagggacatatagtcatagctctgcctttgctacccctcagagctcagcagcttcctgtcagctcggctcagggtggtcatgtttaaggctcttcatggtgtgagccttttcctgttttgttggtttctcaacatgaccaggaatgttgactgccagatcttctagaacacgcttcttccttgggctcaaagctccaagtctcagggggtccggagtggaaatgggatttgggctaaaaccctccaaacctttggcttcctttctcagaagcacaatccacatctgcacagaacaagatgttgagtggagttgggggcttcgtgctgggcctgctcttcctgggagcggggctgttcatctacttcaggaaccagaaaggtaaggagcctggtgggagccccaactccatagcatttcagggaaaagccatggctttgttctcaggatgccattggccctgtgacctcaggtttcattggattctgaatgcaatagtctgtgtttacttgatttgaccctgagaagggataacacatgggagagttaagttgattctggcttgagacctgaggacagaggaagactggggggagccatggtcactgccggtgactgaagctccctaagcccctccctctgtccatgctcctcttggttctgtgtgctctgggcagtattaccagaggaatctcaggtggcagctcagagtctggggacatgtgtctggggacagatctgccttcatgcatgtaagcatctattttattctctcttttctaggacagtctggacttcagccaacaggtaacacccattgtcttctctcagagacagatctgctttccctacagtatgggggctggggtgatggactcagggcacaaaatggggaagactgagatcccagggttggccaggcagttagcactgagccttgctccctgcacttactgaagcctgtgctctgaagcagcaatgattcggggcatgagaagttcctctctgctcactgccatgctgtaaggagaggcctgaagcagtcagagaagccattgcagagtgaggtctggaaacagccctgtcccctgtgctctacaggactcctgagctgagatgaagtaacaaggctgaaggaaggagttccccccgtgtctccatgccatgaaaacatgtcctgcttggcccacatccctccagagacactgctcttccaggacctggctcctcctgattctccaccctggagatctgtgctcctgatggctgcttatccctgacccaggccttgcagctcccaggacagaggccccactcttcacatctcctgtccccttttgtcccttgccttttgtctggcacttctgagccagtctgctgtcatatgcttttttacatttttctcaaataaacaaataatgaaagtcatctgcttcatagagtttcaagcagaagaaacagtaaaaagaaagacaggacccactataagacactgttcatgcataat

SEQ ID NO: 90 - DNA, 1245 bp, Mus musculus
aaagttacagtctgaagcttgccttcccctctgactcctgtgtctcctctcctgcagcatggtgtggctccccagagttccctgtgtggcagctgtgatcctgttgctgacagtgctgagccctccagtggctttggtcagagactccagaccatggtttttggaatactgtaaatctgagtgtcatttctacaacgggacgcagcgcgtgcggcttctggtaagatacttctacaacctggaggagaacctgcgcttcgacagcgacgtgggcgagttccgcgcggtgaccgagctggggcggccagacgccgagaactggaacagccagccggagttcctggagcaaaagcgggccgaggtggacacggtgtgcagacacaactatgagatctcggataaattccttgtgcggcggagagttgagcctacggtgactgtgtaccccacaaagacacagcccctggaacaccacaacctcctggtctgctctgtgagtgacttctaccctggcaacattgaagtcagatggttccggaatggcaaggaggagaaaacaggaattgtgtccacgggcctggtccgaaatggagactggaccttccagacactggtgatgctggagacggttcctcagagtggagaggtttacacctgccaggtggagcatcccagcctgaccgaccctgtcacggtcgagtggaaagcacaatccacatctgcacagaacaagatgttgagtggagttgggggcttcgtgctgggcctgctcttcctgggagcggggctgttcatctacttcaggaaccagaaaggacagtctggacttcagccaacaggactcctgagctgagatgaagtaacaaggctgaaggaaggagttccccccgtgtctccatgccatgaaaacatgtcctgcttggcccacatccctccagagacactgctcttccaggacctggctcctcctgattctccaccctggagatctgtgctcctgatggctgcttatccctgacccaggccttgcagctcccaggacagaggccccactcttcacatctcctgtccccttttgtcccttgccttttgtctggcacttctgagccagtctgctgtcatatgcttttttacatttttctcaaataaacaaataatgaaagtcatctgcttcatagagtttcaagcagaagaaacagtaaaaagaaagacaggacccactataagacactgttcatgcataat

SEQ ID NO: 91 - protein, 262 aa, Mus musculus
MVWLPRVPCVAAVILLLTVLSPPVVRDSRPWFLEYCKSECHFYNGTQRVRLLVRYFYNLEENLRFDSDVGEFRAVTELGRPDAENWNSQPEFLEQKRAEVDTVCRHNYEISDKFLVRRRVEPTVTVYPTKTQPLEHHNLLVCSVSDFYPGNIEVRWFRNGKEEKTGIVSTGLVRNGDWTFQTLVMLETVPQSGEVYTCQVEHPSLTDPVTVEWKAQSTSAQNKMLSGVGGFVLGLLFLGAGLFIYFRNQKGQSGLQPTGLLS

SEQ ID NO: 92 - DNA, 42870 bp, Homo sapiens
  misc_feature (1)...(42870): n = A,T,C or G
ggaatgtgggtggaggggttcatagttctccctgagtgagacttgcctgctgctctggcccctggtcctgtcctgttctccagcatggtgtgtctgaggctccctggaggctcctgcatggcagttctgacagtgacactgatggtgctgagctccccactggctttggctggggacaccagacgtaagtgcacattgtgggtgctgagctactatggggtggggaaaatagggagttttgttaacattgtgcccaggccatgtaccttaagaaattgtgacgtatttttcagagattgcccatctttatcatatggatcccaaataatttccccaccacaaaaggagcttggctacttgcccactccatgagacttgtgtaaggggcctccatacaggtcatttctactcaaatctccaccaataaaacctttgcatcacatgtcctcagggtctttagaggatttagaaataaggatgctaaaataaattccccatacagcacttgcctttattatgttgacttatgtcagacaaaaggaggttttttctgaaaattttgtggaagtcaagggaatttaaagggtctctcctaaacgatcctgggttatgtcacccacaggacctttggtgttggcccctcttcctcatatgtgaggatggacccagtggcctccccattatctactttcttttctttctgaactccaatgtttataaagcctgtacccctgtagtgtatgtaggttctctgacagaagttatacttagtgctctttctttcttgtggggaaaaatccctggaactgaagctgagatctttagtacttggagtcaccttacagatacagagcatttatgaggtattctttggtgcctaaagaacttaaggcatcctctgaaaacctggcccaggttagtgtttattattaatctcttttaacctttctatacttgtttctcctacatctcctaagtgctccaactagacatgacagaagagatttaactaacgtagtatgagttatataaaattctatttttgtaagtcaaaaataatcaaatatcagaaatttaataatgttcaaactatatactctgtgtggggttaccgagacgatgtggacattgttcacgtctcatagggctgaaagtcaatgagcaagtcctgggaactcattgtcttactggggtcttgtcctaaatttcataggttcacccattatgccctcagctttccttaattagccatgtctgcttacctcttcctccagtttctctcttatttttccccagctatgttgttatcatttccagaaatctctaaagcttgcacagatccttagcactatgagatccattgaaagagatagtttttttctttttgagatagggcctggctctgtcacccaggctgtagctcagtggtgcgatcgaggctcactgcaacctctgcctcccacgctcaagcaatcctccctcctcagcctccagagtagctgggaatacaggcaggcaaccacgcccagctaatttttgtaattttggtagaaatgagattttgccatgttgcccaggctggtcttaaactgctggactcaagcaatcctcctgccttggcctcccaacatgctaggattatagatgtgagccactgtgcccaggcaaaaagagatgactctcaataaaaaaagtcctttttcttaaatcactgtttctttatctgtgaattcttcttccaactagaaggaggagaaagaagtttgcctgtatttctcaccaggaggagaaggggtctagtgtgacatcagaatgaaagagtgctggagtttgagccccttcttgctttccaagatccccacagtgatcagttcccataccctggtttattcatgtaaaccacacttatttttcttagcagctactgtgtactcggctccattctaggttcagatcattctatttgattaagacagagagggtcccgactctcatggaagttacacaacaatagaggagacagacactaacccaataagcatttaacaaagaataaaatgttagagagtcatagtgcactgaagaaaagacatcaggtttgtgaagaagagagacatggattcatctactttagttcatatgtttagggagctctacctgagaaagtgacattcagctgagacaacaaaataagtagacagtcatgaagatctaatggacgaaagctccagggagaccaaatggggggaaagccctggtgtgggaaattatgtggagagagagaaagaaggctagaggggctgatgtatagaaagtaaggaaatggagaggcagaagatgaggtaggacacagagagaaagtcaggagcctcatgattataggctctgatgtccacggtaaaaaatttgaattttattttatttatttatttatttattttattttatttatttatttattttttgagatggagtctcgctttgttgcccaggctggagtgcagtggcgcgatctcagctcactgcaagctccacctcctgggttcatgccattctcctgcctcagcctccctagtagctgggactacaggcacccgccaccacgcctggctaatttttagtatttttagtagtgagggcgtttcgtcatgttagccagggtggtctccatctcctgacctcgtgatccacctgccccggcctcccaaagtgctgagactacaggtgtgagccaccacgcctggcctatttttttttttttttttgagacggagtttcgttcttgttgcccaggctggagtgcaatggtgcaatctcggctcactgcaaccttcgcctccctggttcaagtgattctcctgcctcagcttcccaagtatctgagattacaggcacccaccaccatacctggctaatttttatttttttgtatttttagtagacatagggtatcaccatgttgaccatgctggtctcgaactcctgacctcagataatctgtctgccttggcctcccaaagtgctgggattacaggcatgagccacggcggccggactgaattttatttaaatagatacgagaagctactgtatggttacaaggagagtcaatttatattcaatttatttttattttattttatttttttggtgatggggtcttgctctgttgcccaggctagattgtagtggcacaatctcggctcactgcaacctctgccttctgggttcaggcgattctcctgactcagcctccagagtagctgggaccacaggtacatgccaccacacctggctaagtttttgtattttttagtagagacaggatttcaccgtgttagccaggatggtctcgatctcctgacctcgtgatccacccaccttggcctcccaaagtgcagggattacaggcgtgagccactgcgcccggcctatattcaatttttaaaactaattctagctactctgtggggattggaatgttggggttcacaagtggtcaggaagactatttaggagcacagcagggaattctccagcgaaaacaggcttgtggcttcatggagtgcattagtgataaagacggtgaaaaagataaagtggacagacttggcatgtatttttgcttagcttgttaatgaattactgtaaagggggtagaacaatcaagcttattcctaaggattttgttttgacaaataagtgggtggtagtgttgtttattgagataggaaaaactatgggaggaaattatttgaagtgggtggttggaaataaaagttttgtttaaatttgagatgatttattgacatttatgtggagcaatcagaaggtcaatggcatttaagagactcatggtgaggctagggcttcaagtatttatgttggcggcatcaatacgtgtagtgtgttaaattccagggagtggaagaggatacatagggagatggattgtgtggagaaaaaagaacagggcacaggccagcaaagggggctgagaaagagcccagggatgttggagaaaaatcaagagaacatgatgcgtgtacgtcaaggaaaatagatttttttcaaggagaagggagaggccaattgtggtgagtacctataagaggagggggaagtgagaacgtgacagagaagcaagtgctgggtttggtggagttgatatttgcagtcagtggagtatccagggaggaaactggattggacaatttgaagagcgagtagaagtgaggatgaggttaaggttgactgttttgagtagagagcttcagggaaggactgcactctgggttcagggagccagctggatcaaaaggaaaaggctaaagaggctgaagagaagcaggaggacctgtgaaccagagatgctcagtcattattagcaaggaaatactagagagcccctgtgtgcagtgatgactactcatgcaaaaggtcacacagccaatatttaacacagccagtatttcacacagctaatatttattagtgacatagaatataccagttattactctaggtcatgagaatggagtgataaataaaatgaatccggtcgccatcagtatatgccatgtaacattttgcagtgactgtgtaccaggcctgtgaatttcagtatgcaatttcaataatgatcctgctgtatctgtggtgtttaaaaacatatacatctctggaatctaaaattgagaggttataagtaaaacccagtattacaaattgagtgctggaaatcagattgcagtttaaatctgagcatgtagaaagtccctttcttctatgtcagcagatgccttttgtgtgaggtttagctggactgcattattagacataaaccagtgtttctgccctatgttttcagaatgacaattctttatgaaactcatagaagaacagaagacaactgcaaaatcatgatgaagatagtaattgctttagaattaaggaatacaaaaaataatgtgagctgcagttatagggatcataaaagtttaaatgggaatgtatttgagtatgtgatcagtgctaagaagagtcatcatttaattttacacttaacagtaatcctcgtgaggattacgctattattaaatgcatttgatagattacaaaaaggcttatggctggtaaaaattgacccaagtagaagagatcatgtttttattcaggttttctgattctagagtttgagagtttgtccatcattagtgagtagtgactatattgtgtctgaattattgacagaatttctgatattcatatgtaccaggttgtttcttagagtggggacagagatgcaagggctgctagttccgatgtattggggaaactttcattcattttgcatttatcattttaaaagttctgtatgtctataatggtcatgtgttgaagaacacaaggaagtattaaatcactccttcttctaaggtttgactagcaagttgggctagagttaccaaataaaatacatgttcctagtgaaatctgaatttcagatacaaaaccataatttattgaaaatccaaatttaactgggcatcctctggttttatttgccacatctgtcaaccctaagtgtgacacatggacatggattacagtgctaaccatgcaagccacggtgacagcaacttcacacatgtttatttttaactttctctgtaagaaagtgcttagataatttagggataaaaagatagacattgcttgatccagggtgcacacctctctgccatcatttctaaagggcaaagggagatttccgcaggtctttctcacagtctggagagctgctcatttttgtaaagtgtctgtatgagaatgtcattttcttagtttcctcctttctgaggggacttgactacaaaaccaagagttctgcctctggccaaggctggtaatttgatgcctgctagtattgttgggagtgggagactgaaagaaatgagttagttggggcatttaacgggaataaaatagctgtggttgtgattcattactacagataattagtggaccagtggcagagaaattaagaaaaaagatgatgtgaacgataaatgatatgattagtgactgcttggtaaggcaaggaaatcattaaatcttggttctcatcaagttcattttctggaaagatagcactgtattgggagcagaattctacaaaaccttctttttacataggaccaagattttcaacaaatatttttcaatgcaattctcagctgctccataactaatagtagcttgttcaacacagattttttcagatgattcacacctgtggtacttacccagggatggttcaccacccctcccttccctctcatcatcgttggggaacggtgacaatgtttggaacaatttttggttgtcacaaacaggggtttcttctgatattcaatgagtagaagccagggacactgctagagaacccacaatgttcagaacagcctctgccatcaacaaggaattatctggtccaaaatgtcaatagtgctgaggctaagagcactggttcacactgtgctctttctgaaaattctagactcacatctgttatacactcaccacacagtttagtcttttatttttgcttgtttcattataaacaattagacagttgcataaattcaaccactttcttgttgaatccatttagtcaatgcaagctcaatattttcatatttattttttgccttatgcaatatttttcaacattttcatgagttgtcggtcatcactatctctattaactttcaacaacttgcccttgtaagtcacaaatagtgatgctgctgaaattatttctcactaacatgcctcagatttctgtagtgattctacatttgatattattcacaatgtaaaatgcttctatttattcatttcgcttttacccaaggattatttttaagttatttttgtcattttcacacttcaaacataaagacaaaaacatcaaaaatatagtgttttacatatgtgcatattttcacacatatatgtatgtatatttatatgtattgaaactacagaagcacatgtcaccaataagagctctgagacaccttcgaccacttacccttatcagatgagttgtggaaacaagtttttttaactgaatttctgagctttgtggatttagaaatgcaaaggaaggtttgtggacattcacagggatcatgattttattctccttaaaactcttctatactttccaattgtccttagtataaatccaaaatcctaacaccacccaagaggcttttcaatacctggctcctgtgatttctccgggctaatcttttaccctccttcccctcagcctctctgctttagtgaactttctcctagttttttgaagaagttcatcaattcaagcttttgtacatgggatttcctaaacctgaaatgtgcctcccgttttgtccaaacagacacgggctccactctgccccctggctcacacctgcttaacctgtcaagtcacatctgaaccgtcactattaagagggtccttctctggcaccctaatgtaattgagatcatcctattattctctgttctagaactccacacttccgacatttctcattcctgtctaagctcttgtgtgtttggtgttgggccatcactttcactgctctttaagctcccccagcggagtggagaggtctgttttccctcgtttggattcctagaggcagcgcaggcctggcacaaggtcagcactaaggaagtgttcacagaatgaacgcggtgggtgctgttgaaggaaccggtaaagcgtgtgggatgagagaaggagcagagagtgtctttggggtggagactcccaggaggaggcggcgagggctgcggtgctgggcggatcctcctccaactcctgcttggaggtctccagaacaggctggaggcaggaaggggggtcccaaaagcctgggaatcagaaggggttttcccgcctggtcccccagtcccccgttcgcctcaggaagacggaggatgagcccctgggctgctggtcgtgggcgttgcgggtgggcgggttaaggttcccagtgcccgcaccccacccagggagccccggatggtggcgtcgctgtcagtgtcttctcaggaggccgcccgtgtgaccggatcgttcgtgtccccacagcacgtttcttggaggaggttaagtttgagtgtcatttcttcaatgggacggagcgggtgcggttgctggaaagatacttccataaccaggaggagaacgtgcgcttcgacagcgacgtgggggagttccgggcggtgacggagctggggcggcctgatgccgagtactggaacagccagaaggacctcctggagcagaggcgtgccgcggtggacacctactgcagacacaactacggggttggtgagagcttcacagtgcagcggcgaggtgagcgcggcgtggggcggggcctgagtccctgtgagctgggaatctgagtgtgtgtgtgtgtgtgtgtgtgtgtgtgtgtgtgagagagagagacagagagacagagagagagagcgccatctgtgagcatttagaatcctctctatcctgagcaaggagttctgagggcacaggtgtgtgtgtagagtgtggatttgtctgtgtctgtgaggctgttgtgggaggggaggcaggagggggctgcttcttattcttggaggactctgtggggaggtgacaagggaggtgggtgcgggcggctggagagagaggtgaccttgattgtctcgggtccttagagatgcagggaagggaaatgtaaggggtgtgtggttggggtgaaggtttaggggaggagagctgaggggtaaggaaggtttgggataatgtgaggaggccagttccagactgtccctggcacacacccttcatgtaatctctgaaataaaagtgtgtgctgtttgtttgtaaaagcattagattaatttctaggggaattgaggagacctctgaggcatctctgaagcttctttaggtctaaatttcttgctagttttttgttttttattgtgtatatttttacatagtagaaatgactgtgaaactaactttttgaattaaagttttaacacagttactattttattataatgctaatagttttctagtagttacatattattcttttatatataatagttgtgacacaacttacctcactttcccctttgttgacctttattatgacattcaccaaaatttgaaaatgtatgtttctggttaatttttaatttatatttttttcatttataattcttttgaattattttgacctatttattggccagttttaataactgctgtaagaattccctattgtatttggtagggaatggacaatgatctactgcctaatatctcgagggcttagtatttttctcagtgactttgtgggttctttgtactgtgagattattaacactttattgatatttgattcagcatttgctccagtttgtggtttgtatgttgattttgaaaattcttttccatgttaagaatttgaacatttttatataataaaatatgttgcaaaatttttattaatgatttacaatccatcttaaatctgccattttgtggtattgttgtctccaggtttctccttacttctaaaaaaaattgcatttattgagagtctgctagtgttagggattttcctgggcataagcaccccaagtgacgagtcccagacactgccttaatccaaatgtgattctggaaagaaaaatcattttacaatgataggcctaataataattaagcttgtgttgcatgggagatgcattgatcagctaaatgtaaatataagaactttcaaaactaaaatgacgttccttaatccttctctctgctttatgactcatgcttttctgggaaagtaaaaatttggagaatcatttctgtctgtcccaccttcccaggggcagaaccatttctgtggtgttctaaggtgtgagtgcatggcggtagtattcctaaaaattcatattcggtttcgtcatgtacccaactctgtcccgttatctatcaacattgttttaaatcatatatttctgtcaaggtgtacaaggatgataaataggtgccaagtggagcacccaagtgtgatgagccccctcacagtggaatggagtgtgaagctttatgacctcataaattgaaggttatcttcaggcattgttttatatattttacatgcattaatcctcatataatcccaagaggtaaattagtataattatccttcattataggtgacaaagttgagacacagaagaatcaaactcttaaggcagaccttggatttgaaccaggcaacctggctcagatatcagttttaattactacactctgtactttcaaagatttgtaaacactttgacaatgcatgacaatttcaagctatgaagaaacaaacacaatttttcacaatatctctcaaatctaataggtcctcactatcaagattaagttccaggctgatgacactgtaaggccacatggccagctgtgctggaggcctggtcaaggtcagagcctgggtttgcagagaagcagacaaacagccaaacaaggagacttactctgtcttcatgactcattccctctaccttttttctcctagtccatcctaaggtgactgtgtatccttcaaagacccagcccctgcagcaccataacctcctggtctgttctgtgagtggtttctatccaggcagcattgaagtcaggtggttccggaatggccaggaagagaagactggggtggtgtccacaggcctgatccacaatggagactggaccttccagaccctggtgatgctggaaacagttcctcggagtggagaggtttacacctgccaagtggagcacccaagcgtgacaagccctctcacagtggaatggagtgagcagctttctgacttcataaatttctcacccaccaagaaggggactgtgctcatccctgagtgtcaggtttctcctctccgacatcctattttcatttgctccatgttctcatctccatcagcacaggtcactgggggtagccctgtaggtgtttctagaaacacctgtacctcctggagaagcagtctcgcctgccaggcaggagaggctgtccctcttttgaacctccccatgatgtcacaggtcagggtcacccaccctccccgggctccaggcactgcctctgggtctgagactgagtttctggtgctgttgatctgagttatttgttgtgatctgggaagaggagaagtgtaggggccttcctgacatgaggggagtccaatctcagctctgccttttattagctctgtcactctagacaaactacttagcctcattgagtctcaggctttctgtggatcagatgttgaactcttgccttacatcaaggctgtaatatttgaatgagtttgatgtctgaaccttgtaactgttcagtgtgatttgaaatcctttttttctccagaaatggctagttattttagttcttgtgggtcagacttcttccccattttcaaagctctgaatcttagagtctcaattaaagagggttcaatttggaataaacactaaacctggcttcctctctcaggagcacggtctgaatctgcacagagcaagatgctgagtggagtcgggggctttgtgctgggcctgctcttccttggggccgggctgttcatctacttcaggaatcagaaaggtgaggagcctttggtagctggctctctccataggcttttctggaggaggaactatggctttgctgaggttagttctcagtatatgagtggccctgaataaagcctttctttccccaaacggctctaatgtcctgctaatccagaaatcatcagtgcatggttactatgtgaaagcataatagcttgtggcctgcagagacaagaggaaggttaacaagtaggggtcctttggtttgagatcttggagcagattaaggaagagccactaagactaatggaattacactggatcctgtgacagacactttacccttcatgggtcacatggtctgtttctgctcctctctgccctggctggtgtgggttgtagtgacagagaactctccggtgggagatctggggctgggacattgtgttggaagacagatttgcttccataaattttaagtgtatatattttcctctttttcccaggacactctggacttcagccaagaggtaataccttttaatcctcttttagaaacagatacggtttccctagtgagaggtgaagccagctggacttctgggtcgggtagggacttgcagaactttcctgtcttaggagaggtttctaaatgcaccaatcagtgctctgtaaaaacacaccaattggcactctgtggctagatagatgtttgtaaaatggactaatcagcactctgtaaaatggagcaatccacactctgtaaaatggaccaatcaatgctctttaaaatggaccaatcagcaggacatgggcggggacaaataagggaatacaagctggccaccccagccagcagcagcaacccgctcaggtcgccttccatgctgtggaagctttgttcttttgctcttcacaataaatcttgctgttgctcactcttcgggtctgtgccacctttaagagctgtaacactcactgtgaagattcgcggcttcattcttgaagtcagcgaaaccacgaacccaccggaaggaacaaactctggacacactagaattgatggtagaggtgataaggcatgagacagaaataataggaaagactttggatccaaatttctgatcaggcaatttacaccaaaactcctcctctccacttagaaaaggcctgtgctctgtgggactattggctctgggagactcaggaacttgtttttcttcttcctgcagtgctctcatctgagtccctgaaagagaggaaaagaaactgttagtagagtcaggttgaaaacaacactctcctctgtcttttgcaggattcctgagctgaagtgcagatgacacattcaaagaagaactttctgccccagctttgcaggatgaaaagctttccctcctggctgttattcttccacaagagagggctttctcaggacctggttgctactggttcagcaactgcagaaaatgtcctcccttgtggcttcctcagctcctgttcttggcctgaagccccacagctttgatggcagtgcctcatcttcaacttttgtgctcccctttgcctaaaccctatggcctcctgtgcatctgtactcaccctgtaccacaaacacattacattattaaatgtttctcaaagatggagttaaatatcatctggtccatttggctccaaagacaaaaaatgaaaagaaaagaaaaagggaaggaagattatttcccaatagaataatgattttcatgtatatgtcatgagtgtgtgaggtaatacatatgttaaatagcttgctttagacattccacactataggcatatatcaaaacttcatgctgtacaacatgaatatgctatacaatttttacttgtcaattaaaaaaatgctaatatttaaaaaggtaatacataaaaactgagaacagactgtaacaactgaaacaaactgggcaaacatgagatgagaaaccaaccagcaagtcaatcagaactctttcttccccccatctacgatattttgtatttataactctaagttagtgtatagtgtttcactccagagacttaaataatatagtgttatcaaaggacttgtacagatttcaaagacgcatttagaagacagagggttctccattacgttctgagagtcagtatgaaatgtcaaatctaaaagtacataattcagaggtctatttcaaagtaataatcatttgagcataatttctccactgtcagagacaactgttattttattttcaatcaaattaaaagttgtttttatgcatattttatttttagttatatgttacttgtacatacgtagcagtacaagtacatataaatcctgtaagagtataaatcctacagaaatatattaagctgataattatgtctgttctgtttgatcacagagttgcaacaaataggcctcatttcctaagttgaagaaatgattttctcattttatatgagacttgtgtggaattacaaggtagaaccaaaatgtgtggattgaatatttcaaggaagatgcattctgctgctaatagcaggaaatcccatctagtgggctttatttttctttaacccatcatctcacatagccgatagatccaaggctgggcgtctccagggttgctcaactcagcaggccagtgtcatcaccagcgatcctggaacttcatagctcatctctgtcacacacagcacgtcagctttcctgcgatggtcggaggacccctgcagcagctttaggtttcttattctttcatggcaactcccaaaggcaggaaaaagatagtcctttttcctgtgtgcctttataaggagcaactaaactgtttccagagtgttcccagtacccactttctcatacattggaatgaatgtgggatcacatgggctcagacaagacaggatgcaacctttgcagagtgggcctgatgcacatgggaagaaaaggagcaaaatcatatatttttaaaaacaaagaaatggtggatggagtagcagaaattgatttcagggtagggaaatgatagattgtggtactatcaggttgtaagtatttgcgttaacttccacacgaacgcctatagattcctgataggcaccctcaattcagggttttgggtctttatatatgtgtgtgtgtatgtatatatgtgtgtgtatatatatgtatatatacgtatatatgtatatacatgtatatatatgtgtatatacacacacatatacacacacatatatagttattaaatatcagccattaactcaattacaataaaacaaaaaagcaaacaggatttttttagaactcaattaagtatgctgacatgttattttatgaggtaaatatattttccagggaaattgttgaaaaaaagtagaataaggaatgactagctctataaggcgctaaaacataccatacatttacttttaaaaatgccatttgttaccgatttttttaattacatatgttagtaaaacagagtctagaattagaaacagaaaagagttgagatttcgtttcagtttttgtaagttgtattccaaactcatttctttcactaaatagatcctggataaataaaacttgaaacacaaagagaaaatataaaattaccaagacagatgttatttctaatactatcatcatcatcataattatgtttgaagagagactttctaaacccttatgtgttgctggtgggagtgtatgattttacaaatacctggtaatttggcaattttttaaaaagtttaacatatgtttgccctatgacctagcaatctcattccttggaatctacctgagagacataaaaacatatgtcctcacaaagatatgtgttcaagggttcagaacagccttagctatattaggccaaaactaaaaacaatccaaatatccttcaactagtaaatagataaacaaaattctactacatctaggcaaggcaatatcattcaacaataaaagggggcaaaaatagactcatctggcaggggagataccatgaacatgagtgtagttttcccagggcaagtttcacccctggcactgtggatgatgagagattacttaatgggtacaatgcatgtgatttgggtgatggatactgtggaaacaccgacttcaccactgtgcaatctatgcaggtaacaaaactacacttgtaccttataaatttacatacaagaaaaaagacaaaaagaaatgaaaacacaaaatgatgatacatactacaaaacttgtgaactttaataatgttaactaagagaaggaaattggacacaaaagattacatgtcgtatgatttcatttacttgaaatatctagaaaaggtaaatttatagacgcaaaaagcagatcattgggtgcctagggtttggggtctcagtggaacttaactataaatagagaaattttggacatgacagaaatgttctaaaactggattgttgtgataagtgcacagatctattaatttaatcaaatcattcaattttacatatacaatgagtgaattttgtagtacgtaaattatgctttagtaaacctgttaaaataattctttttttaaaaataagacttcataagcaagataaaatccagaagacacaaatgaaaaaaatatttgaagaaaattactgatttctttgcatgaagacaataacaaaattaaaagaagtatatgacgctcaggaaaaattttgctcacgtaaggcagacaatgggctaactttcttatgaaaaattgttaactaatcgataaataaattcatggaaatgccatagataattgggcaaagaatatagactcactatagaagagaatattctaacagccgataaatataaatatttgctcaaactcaccaatgaacagaaaaatccaaattcaaacagtaatgtaataaactatttctcccactccaaaattggcaagtacaatggtttgttttaaaatcaagagtttagaagattctaagggaatagactctcattaggattatgagttatggcagtgtagtggtatctgttaaaactcaaaatacaattgtcacatgctgatgaaaacaacaaaaatcccattctaaacatctgccttaaagaacaatcctacatgagcccaaggagacataaaattggtcattgttgagccacggtttggaataacaaaaacatttccagattcaaaaagaaagattgattaatttgtcttgattacaaacattttgtacatcctaaaaactatgcagtatgtgaagtgacagcacactgcaggatgacatttgatgctgtgtggggcactgtgagcatatattggtgtaaccctgtgagtagtgtggataatacagtatttccactctaggttgttacagtctgggtaaattcttcctcatatgtccatgatgacatataaaaaatgtaacaggggagaaaagaaacattctcttcatttagatacaagaaatgtaaactgtggaatagccatagaaaggaataatattcagggctttaagtaaattatgtaggactatcaacatggattggaaaaaaatcataaaccataatgtcaggtaggaggtggaaaattacaagaattgtcactgttactataagagcaaaaagatatatagactaaactaaatggataaactggaaaataatcttatctttaaaattttaaccagccgtggttcaaaaagtataaaaattccaaattccagagatgaacaaattccacttagacgagcagggacaagtgtcctctcttattctttggtcatctactgaatcttaacatgggtggaagattgagcctggctgagaaagggagattgtgaaggagtaaggacaaactagctgagttgtaaatagcaccaagggcttgtgtgatacactacaatctatagaggccccctgaataatatatatctacttcactctgccagctgattctccttccagaactttttctgacttcatgctggtggtgtgggaactagggaggtagacagaggacaacagacatctctgtagctttgtgcaaacaaagatcaggaaggaaatcaagataggaacaatactttcaaccatcttgacttagttggcacttaaaattgacatataaattgacaacatctgataactacagaatatttacttttttacattgcacaaagattatccatgtaatagaacaaatactatgactataaaactagtctcaattactttcataagaataaattcatacggagtatattctctgaacacaatcttatcaaattacaaattagtaagattgagaaaactcccaaatttttggaagtaaaataatacatttctaaataatctgtggcttgccaaagaggaaatcagaaggaaattagaaaataattttgaataaaataatactaacttgaatttttaaagttttcgagatgcaaccaaggcagaccttagagaaaaatacttagttttaaatgcctgtattttaaaaggataaatatacaaaaatcaaaggtgtaaacttttaacttaataattaaaaaaagcaaatttaagttgaaaaaagtagaagaaaaaagcaaagatgtgaggaaatcaataacattattttcttggttttgttttctatttatgatagagcataattgtgttagtccattcttacattgccagaaagaaatacctgaggctgggtaattcataaagaaaagagggttaactggctcagggttctgcaggctgtacaggaggtgtggtgctgacaattgcttctggtgagggcctcaggaagctaacaatcatggcggaaggaaaggggatcccgggtatcacaatgtgagagcaggagcacagagagagtagggaagagtcgcacttctttaaacaaccacgtctcctgtgaactgagtcagaactcactcattacagctaggatggcaccaagccattgatgaaggatctgccccccgacccaaatacctctcaccaggcctaacctccaacaatggaggttacattttaacatgagatctggaggggaccaagcatccaaaatatatcaataacataattggtttaatgtatactgactttgtaatcagcaacattacttaaatttacttatnnnnnnnnnnnnnnnnnnnnnnnnnnnnnnnnnnnnnnnnnnnnnnnnnnnnnnnnnnnnnnnnnnnnnnnnnnnnnnnnnnnnnnnnnnnnnnnnnnnnnnnnnnnnnnnnnnnnnnnnnnnnnnnnnnnnnnnnnnnnnnnnnnnnnnnnnnnnnnnnnnnnnnnnnnnnnnnnnnnnnnnnnnnnnnnnnnnnnnnnnnnnnnnnnnnnnnnnnnnnnnnnnnnnnnnnnnnnnnnnnnnnnnnnnnnnnnnnnnnnnnnnnnnnnnnnnnnnnnnnnnnnnnnnnnnnnnnnnnnnnnnnnnnnnnnnnnnnnnnnnnnnnnnnnnnnnnnnnnnnnnnnnnnnnnnnnnnnnnnnnnnnnnnnnnnnnnnnnnnnnnnnnnnnnnnnnnnnnnnnnnnnnnnnnnnnnnnnnnnnnnnnnnnnnnnnnnnnnnnnnnnnnnnnnnnnnnnnnnnnnnnnnnnnnnnnnnnnnnnnnnnnnnnnnnnnnnnnnnnnnnnnnnnnnnnnnnnnnnnnnnnnnnnnnnnnnnnnnnnnnnnnnnnnnnnnnnnnnnnnnnnnnnnnnnnnnnnnnnnnnnnnnnnnnnnnnnnnnnnnnnnnnnnnnnnnnnnnnnnnnnnnnnnnnnnnnnnnnnnnnnnnnnnnnnnnnnnnnnnnnnnnnnnnnnnnnnnnnnnnnnnnnnnnnnnnnnnnnnnnnnnnnnnnnnnnnnnnnnnnnnnnnnnnnnnnnnnnnnnnnnnnnnnnnnnnnnnnnnnnnnnnnnnnnnnnnnnnnnnnnnnnnnnnnnnnnnnnnnnnnnnnnnnnnnnnnnnnnnnnnnnnnnnnnnnnnnnnnnnnnnnnnnnnnnnnnnnnnnnnnnnnnnnnnnnnnnnnnnnnnnnnnnnnnnnnnnnnnnnnnnnnnnnnnnnnnnnnnnnnnnnnnnnnnnnnnnnnnnnnnnnnnnnnnnnnnnnnnnnnnnnnnnnnnnnnnnnnnnnnnnnnnnnnnnnnnnnnnnnnnnnnnnnnnnnnnnnnnnnnnnnnnnnnnnnnnnnnnnnnnnnnnnnnnnnnnnnnnnnnnnnnnnnnnnnnnnnnnnnnnnnnnnnnnnnnnnnnnnnnnnnnnnnnnnnnnnnnnnnnnnnnnnnnnnnnnnnnnnnnnnnnnnnnnnnnnnnnnnnnnnnnnnnnnnnnnnnnnnnnnnnnnnnnnnnnnnnnnnnnnnnnnnnnnnnnnnnnnnnnnnnnnnnnnnnnnnnnnnnnnnnnnnnnnnnnnnnnnnnnnnnnnnnnnnnnnnnnnnnnnnnnnnnnnnnnnnnnnnnnnnnnnnnnnnnnnnnnnnnnnnnnnnnnnnnnnnnnnnnnnnnnnnnnnnnnnnnnnnnaaaataaaaaatatatattacacttgcagaagtggaaagggatataaaggaggtaaagtttccacactttagtcaaattggtaaaatgtcagcaccagtagactatgataagttatgttaatagacagatacatcacaaaaactatacaatgagatacaccaaaaaaagattgatttaaaaatggaattctaaaaattgcttaaggaacacattggaaaataggaaaggaaaccagagaagaaaaaaccaaaggaaacaaaaaagaaaacaaagcagatggcaatcataagagctcacatattaataattgcattacatgtaaagtgtgtaaaaagacaaatgtcagagtgaaaaacaatgactcttcgacatgctacctacaagaaacttaactgccaatattacatgcccatcttcccttggcttccctgtgactgaggtggcaaaaggctggtgtgtcaatgcttcccttgagcgtgcacacacccagccagtctatggcagcactggggctttgccccaactccactctgagatcagagtgggcacccgggacccaggtgaggccaacagagaggccataaagtgggagcagacacctccaagcctgcatggacacgacggccttttcagcctcgagggcatgaagtgtagagaggcctggatcctgctgcctgcggggagggccaggagggtgaagcttccaacccattccatggagcctgcaggtatcccctgtcacaccttctggcagcctggggtgggcagctcccctccctggtcccaggccagcatgtggggcaaaggtgatgtctctgcaagttattctgctagcactcagggtgcccggggctccttctcgcctggatggggcgggggaggcaccttggggaacagaacacagcccgggcctggctgtcaggagcatcaggctcggtcgccacccgcagggacaaaagcctgggcggcctcaggcagagcatcttcctgaggcgcaggaactggcgccctcggcagagtgggacagtggccttgccgctggccgggtcctcaaagtgaggccactcccacgtcccaccccgggccactgaagggtagccccagctccatgccctccccacaactgcagggtgagagcagcaacgcaggagtggtgaaggctgtgggcctgggagcggtcccgctggctgttcaagagtggggtcagtgcagtcagctgcctcagtgacgcgaggcacaggggacatggggcacaagggtcccaccacggccactactccctcagtggctcctgccgccaccgcttgcaacttcccgctgtagccggccactctggacagctcgccactgccagcatcaccacccttttatcctgaaatactaacatgaaccttagctggatttcctagattactatcttcacaattagtttcttttttttcacaatttgtttctttttttctttttctttttcttttctccttctttttgaaggagtatgatatagtggctgagcttgagaggtatattatttggttcaatctatagtgtaccatttactagtgtatctgtgcaaaagttgtgttatctccatcattttagtctctccacctgtaagcatgaaaacggtgtttattttactgagctgatgtgagaattacataaaaatatgaagcacagaaagcttttagtacaattctgagtacaaagtcaaatgctcatttttattgcagcatggtgagaatcctgcttctggaaacactaaggcacataaggaaggagtgcccatcagaannnnnnnnnnnnnnnnnnnnnnnnnnnnnnnnnnnnnnnnnnnnnnnnnnnnnnnnnnnnnnnnnnnnnnnnnnnnnnnnnnnnnnnnnnnnnnnnnnnnnnnnnnnnnnnnnnnnnnnnnnnnnnnnnnnnnnnnnnnnnnnnnnnnnnnnnnnnnnnnnnnnnnnnnnnnnnnnnnnnnnnnnnnnnnnnnnnnnnnnnnnnnnnnnnnnnnnnnnnnnnnnnnnnnnnnnnnnnnnnnnnnnnnnnnnnnnnnnnnnnnnnnnnnnnnnnnnnnnnnnnnnnnnnnnnnnnnnnnnnnnnnnnnnnnnnnnnnnnnnnnnnnnnnnnnnnnnnnnnnnnnnnnnnnnnnnnnnnnnnnnnnnnnnnnnnnnnnnnnnnnnnnnnnnnnnnnnnnnnnnnnnnnnnnnnnnnnnnnnnnnnnnnnnnnnnnnnnnnnnnnnnnnnnnnnnnnnnnnnnnnnnnnnnnnnnnnnnnnnnnnnnnnnnnnnnnnnnnnnnnnnnnnnnnnnnnnnnnnnnnnnnnnnnnnnnnnnnnnnnnnnnnnnnnnnnnnnnnnnnnnnnnnnnnnnnnnnnnnnnnnnnnnnnnnnnnnnnnnnnnnnnnnnnnnnnnnnnnnnnnnnnnnnnnnnnnnnnnnnnnnnnnnnnnnnnnnnnnnnnnnnnnnnnnnnnnnnnnnnnnnnnnnnnnnnnnnnnnnnnnnnnnnnnnnnnnnnnnnnnnnnnnnnnnnnnnnnnnnnnnnnnnnnnnnnnnnnnnnnnnnnnnnnnnnnnnnnnnnnnnnnnnnnnnnnnnnnnnnnnnnnnnnnnnnnnnnnnnnnnnnnnnnnnnnnnnnnnnnnnnnnnnnnnnnnnnnnnnnnnnnnnnnnnnnnnnnnnnnnnnnnnnnnnnnnnnnnnnnnnnnnnnnnnnnnnnnnnnnnnnnnnnnnnnnnnnnnnnnnnnnnnnnnnnnnnnnnnnnnnnnnnnnnnnnnnnnnnnnnnnnnnnnnnnnnnnnnnnnnnnnnnnnnnnnnnnnnnnnnnnnnnnnnnnnnnnnnnnnnnnnnnnnnnnnnnnnnnnnnnnnnnnnnnnnnnnnnnnnnnnnnnnnnnnnnnnnnnnnnnnnnnnnnnnnnnnnnnnnnnnnnnnnnnnnnnnnnnnnnnnnnnnnnnnnnnnnnnnnnnnnnnnnnnnnnnnnnnnnnnnnnnnnnnnnnnnnnnnnnnnnnnnnnnnnnnnnnnnnnnnnnnnnnnnnnnnnnnnnnnnnnnnnnnnnnnnnnnnnnnnnnnnnnnnnnnnnnnnnnnnnnnnnnnnnnnnnnnnnnnnnnnnnnnnnnnnnnnnnnnnnnnnnnnnnnnnnnnnnnnnnnnnnnnnnnnnnnnnnnnnnnnnnnnnnnnnnnnnnnnnnnnnnnnnnnnnnnnnnnnnnnnnnnnnnnnnnnnnnnnnnnnnnnnnnnnnnnnnnnnnnnnnnnnnnnnnnnnnnnnnnnnnnnnnnnnnnnnnnnnnnnnnnnnnnnnnnnnnnnnnnnnnnnnnnnnnnnnnnnnnnnnnnnnnnnnnnnnnnnnnnnnnnnnnnnnnnnnnnnnnnnnnnnnnnnnnnnnnnnnnnnnnnnnnnnnnnnnnnnnnnnnnnnnnnnnnnnnnnnnnnnnnnnnnnnnnnnnnnnnnnnnnnnnnnnnnnnnnnnnnnnnnnnnnnnnnnnnnnnnnnnnnnnnnnnnnnnnnnnnnnnnnnnnnnnnnnnnnnnnnnnnnnnnnnnnnnnnnnnnnnnnnnnnnnnnnnnnnnnnnnnnnnnnnnnnnnnnnnnnnnnnnnnnnnnnnnnnnnnnnnnnnnnnnnnnnnnnnnnnnnnnnnnnnnnnnnnnnnnnnnnnnnnnnnnnnnnnnnnnnnnnnnnnnnnnnnnnnnnnnnnnnnnnnnnnnnnnnnnnnnnnnnnnnnnnnnnnnnnnnnnnnnnnnnnnnnnnnnnnnnnnnnnnnnnnnnnnnnnnnnnnnnnnnnnnnnnnnnnnnnnnnnnnnnnnnnnnnnnnnnnnnnnnnnnnnnnnnnnnnnnnnnnnnnnnnnnnnnnnnnnnnnnnnnnnnnnnnnnnnnnnnnnnnnnnnnnnnnnnnnnnnnnnnnnnnnnnnnnnnnnnnnnnnnnnnnnnnnnnnnnnnnnnnnnnnnnnnnnnnnnnnnnnnnnnnnnnnnnnnnnnnnnnnnnnnnnnnnnnnnnnnnnnnnnnnnnnnnnnnnnnnnnnnnnnnnnnnnnnnnnnnnnnnnnnnnnnnnnnnnnnnnnnnnnnnnnnnnnnnnnnnnnnnnnnnnnnnnnnnnnnnnnnnnnnnnnnnnnnnnnnnnnnnnnnnnnnnnnnnnnnnnnnnnnnnnnnnnnnnnnnnnnnnnnnnnnnnnnnnnnnnnnnnnnnnnnnnnnnnnnnnnnnnnnnnnnnnnnnnnnnnnnnnnnnnnnnnnnnnnnnctactataaagtgggtaaagtagggagctaaatttgtcactgtgcccaggccatgtcccttaagaatatgtgacgttttcaacagggattgcccatctttatcatatggatcccaaattatttcctccacaaaaggagcttcactacttgccctctccatgagactgtgtaaggggcctctgtacaggccatttcttttcaaatctccaccaataaaacctttgcatcacatgtcctcagggtctttagaggattttgaaatgtggatgctaaaataaattccccatacagcacttccctttattatgttgacttatgtcagacaaaaggtttttttctgaaaattttgttggagtcaagggaattcaaagggtctctcctagatgatccagtgttatgtactccggaggacctgtggtattggcccctcttcctcatatgtgaggatggacccagtggcctccccattatcttctttcttttctttctgcagtccaatctttataaagcctgtatccctgtagcatatgtagggtctcttacaaaagttattcttagtgctctttctttcttatggggaaaaatccctggaactgaagctgagatctttagtatttggcttcaccctacagacaaagaatatctatggggtgttctttggtgcctaaagaacttaaggcatcctctgaaaacctggcccaggttagtgttttttatgaatctcttttaacctttctatactagcttctcttacgtgctctaattagactccacaagaagagattcaatgaatgtaggataaactatatgaaattctatttttgtaagtaaaaagtagtcaaatatcagaaacttgctaaggttcaaactatatactctgagtgaagttaccgagacaatgtggacattgttcacatctcatagggctgaaagtcaatgagcgagtcttagaaactcattgtcttactcgggacttgtcctaaatttcataggttcacccatcatgcccttggcttttcttaattagccatgtctgcttacctcttcctccagtttctctctatttttccccagctatgttgtcattatttcctgaaatccttgaagtttgcacagacccagagcactatgaggtttatcacaagagataatttcttctttttttgagacagggcctggctctgtcacccaggctgtagtgcagtggtgtactagaggctcactgcaacctctgccaccaaagctcaagtgatcctccctcctcagcctccagagtagctgagactacaggcaggcagccacacccagcttatccctaaggattttgtctcgacaaataagtggatggtggtgttgtttattgagatagggaaaattgtgggaggaaattgtttgaagtgggtggttggaaatgatttattgacatttatgtggaacaatcagaaggtcattggaatttaagagactcaagatgaatcccagggctggaggtatttatgttggtggcatcaatacctttattctgttaaattccagggagtggaagaggatacataaggtaatagcttgtgtgtagaaaaaagaagaaggcacaggccagcaaaggggactgacagggaaacccagggatgttggagaaaaaccaagagaacataatgcatgtaagtcaaggaaaacagatatttttcaagaagaagggagaagccaatgcgtatcactaagtgggtgaagtgagaatgtgagagagaagcaagtgctgggtttgctggagttgatatttgcagtcaatggagtatccaggatggaaaatggattggaccatttgaagagcaagtagaagaagtgaggatgaggttaaggttgactgttctgagtagagagcttcagggaaggactgcgctactgggttcaggaagccagctgaatataaatgaaaaggctaaagaggctgaagagaagcaggaggacctgtaaccagagatgnnnnnnnnnnnnnnnnnnnnnnnnnnnnnnnnnnnnnnnnnnnnnnnnnnnnnnnnnnnnnnnnnnnnnnnnnnnnnnnnnnnnnnnnnnnnnnnnnnnnnnnnnnnnnnnnnnnnnnnnnnnnnnnnnnnnnnnnnnnnnnnnnnnnnnnnnnnnnnnnnnnnnnnnnnnnnnnnnnnnnnnnnnnnnnnnnnnnnnnnnnnnnnnnnnnnnnnnnnnnnnnnnnnnnnnnnnnnnnnnnnnnnnnnnnnnnnnnnnnnnnnnnnnnnnnnnnnnnnnnnnnnnnnnnnnnnnnnnnnnnnnnnnnnnnnnnnnnnnnnnnnnnnnnnnnnnnnnnnnnnnnnnnnnnnnnnnnnnnnnnnnnnnnnnnnnnnnnnnnnnnnnnnnnnnnnnnnnnnnnnnnnnnnnnnnnnnnnnnnnnnnnnnnnnnnnnnnnnnnnnnnnnnnnnnnnnnnnnnnnnnnnnnnnnnnnnnnnnnnnnnnnnnnnnnnnnnnnnnnnnnnnnnnnnnnnnnnnnnnnnnnnnnnnnnnnnnnnnnnnnnnnnnnnnnnnnnnnnnnnnnnnnnnnnnnnnnnnnnnnnnnnnnnnnnnnnnnnnnnnnnnnnnnnnnnnnnnnnnnnnnnnnnnnnnnnnnnnnnnnnnnnnnnnnnnnnnnnnnnnnnnnnnnnnnnnnnnnnnnnnnnnnnnnnnnnnnnnnnnnnnnnnnnnnnnnnnnnnnnnnnnnnnnnnnnnnnnnnnnnnnnnnnnnnnnnnnnnnnnnnnnnnnnnnnnnnnnnnnnnnnnnnnnnnnnnnnnnnnnnnnnnnnnnnnnnnnnnnnnnnnnnnnnnnnnnnnnnnnnnnnnnnnnnnnnnnnnnnnnnnnnnnnnnnnnnnnnnnnnnnnnnnnnnnnnnnnnnnnnnnnnnnnnnnnnnnnnnnnnnnnnnnnnnnnnnnnnnnnnnnnnnnnnnnnnnnnnnnnnnnnnnnnnnnnnnnnnnnnnnnnnnnnnnnnnnnnnnnnnnnnnnnnnnnnnnnnnnnnnnnnnnnnnnnnnnnnnnnnnnnnnnnnnnnnnnnnnnnnnnnnnnnnnnnnnnnnnnnnnnnnnnnnnnnnnnnnnnnnnnnnnnnnnnnnnnnnnnnnnnnnnnnnnnnnnnnnnnnnnnnnnnnnnnnnnnnnnnnnnnnnnnnnnnnnnnnnnnnnnnnnnnnnnnnnnnnnnnnnnnnnnnnnnnnnnnnnnnnnnnnnnnnnnnnnnnnnnnnnnnnnnnnnnnnnnnnnnnnnnnnnnnnnnnnnnnnnnnnnnnnnnnnnnnnnnnnnnnnnnnnnnnnnnnnnnnnnnnnnnnnnnnnnnnnnnnnnnnnnnnnnnnnnnnnnnnnnnnnnnnnnnnnnnnnnnnnnnnnnnnnnnnnnnnnnnnnnnnnnnnnnnnnnnnnnnnnnnnnnnnnnnnnnnnnnnnnnnnnnnnnnnnnnnnnnnnnnnnnnnnnnnnnnnnnnnnnnnnnnnnnnnnnnnnnnnnnnnnnnnnnnnnnnnnnnnnnnnnnnnnnnnnnnnnnnnnnnnnnnnnnnnnnnnnnnnnnnnnnnnnnnnnnnnnnnnnnnnnnnnnnnnnnnnnnnnnnnnnnnnnnnnnnnnnnnnnnnnnnnnnnnnnnnnnnnnnnnnnnnnnnnnnnnnnnnnnnnnnnnnnnnnnnnnnnnnnnnnnnnnnnnnnnnnnnnnnnnnnnnnnnnnnnnnnnnnnnnnnnnnnnnnnnnnnnnnnnnnnnnnnnnnnnnnnnnnnnnnnnnnnnnnnnnnnnnnnnnnnnnnnnnnnnnnnnnnnnnnnnnnnnnnnnnnnnnnnnnnnnnnnnnnnnnnnnnnnnnnnnnnnnnnnnnnnnnnnnnnnnnnnnnnnnnnnnnnnnnnnnnnnnnnnnnnnnnnnnnnnnnnnnnnnnnnnnnnnnnnnnnnnnnnnnnnnnnnnnnnnnnnnnnnnnnnnnnnnnnnnnnnnnnnnnnnnnnnnnnnnnnnnnnnnnnnnnnnnnnnnnnnnnnnnnnnnnnnnnnnnnnnnnnnnnnnnnnnnnnnnnnnnnnnnnnnnnnnnnnnnnnnnnnnnnnnnnnnnnnnnnnnnnnnnnnnnnnnnnnnnnnnnnnnnnnnnnnnnnnnnnnnnnnnnnnnnnnnnnnnnnnnnnnnnnnnnnnnnnnnnnnnnnnnnnnnnnnnnnnnnnnnnnnnnnnnnnnnnnnnnnnnnnnnnnnnnnnnnnnnnnnnnnnnnnnnnnnnnnnnnnnnnnnnnnnnnnnnnnnnnnnnnnnnnnnnnnnnnnnnnnnnnnnnnnnnnnnnnnnnnnnnnnnnnnnnnnnnnnnnnnnnnnnnnnnnnnnnnnnnnnnnnnnnnnnnnnnnnnnnnnnnnnnnnnnnnnnnnnnnnnnnnnnnnnnnnnnnnnnnnnnnnnnnnnnnnnnnnnnnnnnnnnnnnnnnnnnnnnnnnnnnnnnnnnnnnnnnnnnnnnnnnnnnnnnnnnnnnnnnnnnnnnnnnnnnnnnnnnnnnnnnnnnnnnnnnnnnnnnnnnnnnnnnnnnnnnnnnnnnnnnnnnnnnnnnnnnnnnnnnnnnnnnnnnnnnnnnnnnnnnnnnnnnnnnnnnnnnnnnnnnnnnnnnnnnnnnnnnnnnnnnnnnnnnnnnnnnnnnnnnnnnnnnnnnnnnnnnnnnnnnnnnnnnnnnnnnnnnnnnnnnnnnnnnnnnnnnnnnnnnnnnnnnnnnnnnnnnnnnnnnnnnnnnnnnnnnnnnnnnnnnnnnnnnnnnnnnnnnnnnnnnnnnnnnnnnnnnnnnnnnnnnnnnnnnnnnnnnnnnnnnnnnnnnnnnnnnnnnnnnnnnnnnnnnnnnnnnnnnnnnnnnnnnnnnnnnnnnnnnnnnnnnnnnnnnnnnnnnnnnnnnnnnnnnnnnnnnnnnnnnnnnnnnnnnnnnnnnnnnnnnnnnnnnnnnnnnnnnnnnnnnnnnnnnnnnnnnnnnnnnnnnnnnnnnnnnnnnnnnnnnnnnnnnnnnnnnnnnnnnnnnnnnnnnnnnnnnnnnnnnnnnnnnnnnnnnnnnnnnnnnnnnnnnnnnnnnnnnnnnnnnnnnnnnnnnnnnnnnnnnnnnnnnnnnnnnnnnnnnnnnnnnnnnnnnnnnnnnnnnnnnnnnnnnnnnnnnnnnnnnnnnnnnnnnnnnnnnnnnnnnnnnnnnnnnnnnnnnnnnnnnnnnnnnnnnnnnnnnnnnnnnnnnnnnnnnnnnnnnnnnnnnnnnnnnnnnttgctagtatctgtatttggtgctgtgcaccttctacccttcgatgtaaagaatttggcttacacttgtttgtctcctagtgcatacctgacatggaatttaaattggcaagaaatgtgtgcagaccaggctagacagaatcatgtggctggacacagagacattacagaggacatgctgttaggtaatggcccttattcagacctggaacatcaaatggcactcccaaatgccagcagtgtgcacaggccgctaaatgtgactgggccacaatttcacaattctggaaaagggagtcccattacaatcctttttacatatcatgcaagggtcacaggaaccttatgcacaatttcttgcatgactacaagaggcaatgaagcatcagatttatcatactgctgctgcagagatgctaagtttaactctagcttttgagaatgtaaatgcagattgtaaacgtgcattggcacctgtgaggtgtacaaaaaacttgggaaattttctcagagcttgtcaagatgtgggaactgagcttcattgctctacaatattagcgcaggcaggggctaatttagcagttgacaaatctaaaagggtcaaaccctaaaatgggaaaatgttataattgtggaaaaaccagacattttaaaaaggaatgctgccagatctcaggacagaaaggaccttacaatgcggtgctccacccagcagaaaaaacaccaggactttgtcctcgctgtaaccaaggaagtcactgggctaatcagtgccgctcaaaatttcatcaaaacagcacccacctgttgggaaactagaagggggcctggacctgggaccctcaaacaatgagggcatttccagttcagaccacagtcccacttcagggatgggtcccaggagaaaaattgattcctggtattcttcacctcaccagtaagcgcaggattagatctccctgccagagaaagaacattatttggaggagacaaacctaccaaagttcccactggcatttggggacctttaccaacaggatacataggactaattttaggcaaaaacccccttaacttgcaaggcatcactgtagtccctggagtagttgactccgattatgaaggagaaactcaagttgttttaatgtcaaaaatctttgcgtttttgaactgggagaatatattgctcaattgttgcttatttcctgcaaattacatccttctccatgaaaggagaaacgaggaaatacagggtttgggagcacaactacaatggaaatctatctatcccagcccacagcctctaatagacccacctgtgtagtacaaattaaaagaaagaaattttatgggcttatggatacaggagctgaagtgtcagtaatatccagtaaggactggcccccagtatggtctctcagactaacctccacatccctagtgggaataggagcagctaaaagtgttcaacagagtgctgacattttaccttgtcttggtccggatggacagtcatgtacttttcagccttatgttgcaaatacaccaatcaatttatgggattgagacttacagcatagaatatgagacttacaaatgaaaactttgataacccaggatttaaaatgttgatggacatgggatatcagagtgggacaggtttagggaaattcctacaaggaaaacctaacccgatatcaataactggaaaaacagttagaaaagggataggatgtcaggatttctgatgagggtcattgatatttctcctccaccctctgccttaccattagatggccagtgacaaacccatatgggtggatcaatggcccctacctcaggaaaagctgatgcaacttcagcagctagtataagaacaattggacacaggacatatagaggagtcagttagcccctggaattcaccaatgttttttattccaaaaaagtccagaagatggtgactgctgcatgatttgagagctattaatgcacaatttaaaccaatgggtccattacagcaaggtgtgccaattccagtggtcattcctagagactggtctcttgtagcaataaatcttaaggattgattcttcacgataccattacacgagaaggataagcctcgatttgccttctctgtgccttctattaatcaaagagaacctgtttcttgctatcaatggagagttttacccgaaggcatgcttaacagtcctacactatgtcagcattttgtaggacaggcattaaaggagcctcaaaatatgtttcctactacttacatcattcattttatggatgacattgttttggccgctcctacagaacaaatcttacatcagttattctgagaaacaaagcaggctttaactaaatggaatctcaaaatagctccagaaaaggtgcaaacaacttcaccatatcattacttagataatattgttactgaaagaagtgtacggtctcaaaaagcagttctccataaagacaggttacagactttaaatgattttcaacagttgttaggggatattaattggctgcacccgatgctaggtattgccacttatcaacttacacatctttatgaaaccctaaaaggagattcttcattagatttcccacagcaattgaccaaagaggcagaagctgagttacagcttgtagaacagatgcttcagcaatagcataccccccagctacagccacaaaagcctttgttttctctatccatcagacaaaatcttgcagttttatagagtctattctttcattcttcctgtgattactcatcacaagcctattccaagtggacaaaccattttactgatggctcttccaaaggtcatgcagctatctatggacccaagcacactcaaacagtaatgacctctgggatttccactcaatgctcagagttgattgcagtcattcaggttttacagctcacagcttcagatcctatcaacattgtctgtgattgagcctatgttgtaaatgtagccagtcacgtagaaactgctccaattgaaagtaccctagaaccaaaactacttaatttgttcctaagacttcagcaaactattcactctcatgcagctccttttcatatttctcatattttctctcacacacaacttcctgaagccctatctctaggtaatgatagagcagataaattgattgattccgtatttcagcaagctcaaacctctcatatattactgcaacaaaacacctcttcccttacttgtacatttagcttgcctcacagccaagctaggtctataatacaagcctgtcctacttgccagcatgtccctggagccacacctatagaaggatgtaatccacgaggcttgcctccaaatgaaatttggcaaatggatattacgcacatagcagcctttggtaagtttagctatgttcatgtgcctatagacacttattctcatatgctgcatactacatgccaaacaggtgagacagctggtcatgtgcggcaacatttctgttgtcatttgctcatatggggatacctaaacaattaaaaactgacaatggacctgcttatgctagtcatgcttttcaaaatttcctgcagctttgggccataacccataaaacaggaattccttataatcctagaggacaagatattacagagcaggcacatcaaacattacaacacatgttgaaaagacaaaaaggaggagtaggggacaagttaccactgcaatcaaagttgtatttagccttatttgctttaaatgttttgactccttgtacgaatgttaagactccagcggaaagacattggtcactgttagagaaaaagaggagaggttttccgaaagtgttatggaaatccccagaaaaaggaaaatggaaagatccggtggatttactgatgtagggatgagggtatgcttgtgttttcacaggagatggacaaaccatgtgggtgccctcaaggtgcgtgcgaccatggaacaggagactggaggaacccagggtggccaaccatgggcccggtccctccagtacgggccatgagccagctgagcctgagtgaaaagatggagagaaggatgatcagagtcattacaatatcaaccctcataaactgcgggcaactcaggaaaaccatgcaggaagctgagaaactactggagcatcagggacaggcaaaaacccctgattccatgttcttggctaagatacccataatgtcttgtgcggtatgttttccctgtgcagaggcaaaaatatattgggcatatattcccaatcccccagcagtatggcctatactctggagtgacactcctcctgagattgatcataatcagggagcgtgggctccaggacccctaactccccctgacatagaacagttagactctcagaacaatgtcatcannnnnnnnnnnnnnnnnnnnnnnnnnnnnnnnnnnnnnnnnnnnnnnnnnnnnnnnnnnnnnnnnnnnnnnnnnnnnnnnnnnnnnnnnnnnnnnnnnnnnnnnnnnnnnnnnnnnnnnnnnnnnnnnnnnnnnnnnnnnnnnnnnnnnnnnnnnnnnnnnnnnnnnnnnnnnnnnnnnnnnnnnnnnnnnnnnnnnnnnnnnnnnnnnnnnnnnnnnnnnnnnnnnnnaaaatcatgtacttcttaagtcttagttctattaaatgtaactggtgtgctaaccgaccattcccgggccaattgccctaattgtgctgactagacggaatgaattcccctcaatagttcctatcaccctctgtggaccccgtgtcttggctcactggctaaaaaataatcaatattaactggagatattgtggattggagacctaaagatcaactagatggaaaagataataatcagaaagcatggcacaaatttcgctggcattggtggcaagcttataatgcttcttctttataccacaccgggatccaatcctattctgctgcccagattgcttggcatggaacaggctttagcccgcctcttcctcagtggcattatctagggaggaaaggaccaatccaagagatgttatggaaggcagcactcccatttatgaatggcagcatctgggttgggataccatccaataatagcaatagtaagtgacacagttttaatgttacatttgtaaggaatatcaccactcaatttacagcttgtgtttttgcctgtaaatcttgccagttatatcactgcattaatcatagcacattgcaaacacataatatctctactttgataattttgggttgcatccctggactatggattcctgttaatctttccaagccttgggctgccacacctgctttgcattacgtgaaactttttctaactcagcttactcatcgtggccatagagccttaggcatgataatttttgctatagtttccttggtcacactaataacttatgttgtgatgtcctctgcagcttttcatagttctattcaaacaacccattacatggagaactggatacctatggctgaccaagcgtggctacttcagaataaagttaacactgagttacaaactgaagtagcaatgttgaaatccactgttctatggttagaggaacaagtacaaagcttatagttgcagcagcaattgctttgtcatcttaatcaccctcatatttgtgtaaccaaatggttagaatataaccaaagtgagtatccatgggaccttgtgaaagtccatttgcagggagctttcacatccaacatcacctttgatattggtgaattacaaaacaaaatttttgacttaaataagcaaactcaagagtttcagccttctttagaagactggactgaattccagcaaggcctggagagcctcaatccttggacctatctaaaacactacgttaacatctcatatgtagttctggaaataatgttgttttgtctctgtcttctgttcatagtctgtaaaactggatggtccgccaatgggaaaatgagagctgcccaacctggccttacattctttcaattaatacataaacagaaagagggaaatatagagagccagaggccggagaattgtcaccaattcagcattccacagaggctatattatcaaacagcgaactgtttatcatgaatacagaatgtgggcaaactcgcttctgtgccggccgccagaaggtttgctgagggcaatcactccctggtgccgggctccttgaggttatgtactgggacatctagagcctattgtttgaggaatagtcttgcaagcctgctctggatcaagccacagactgaaacacccccgaagagcaaggtgcgccctgaccccttcttccaaatatactcttctgtcttttgtctttattcacccatttatcctctttgttcagtccaacagggactgtggcaatttagtcaatgcaagttcagtatcttcatatttattttttgccttatgcaatatttctcaacattttcatgagttgttggtcatcactacctctattaactttcaacagtttgcccttgtaagtcacaaatagtgatgctgctgcaattatttttcactaacatgcctcagatttctgtagtgattctacttttgatactgttcacaatgtaaaatgcttctacttattcatttcacttttaaccacaggattatttttaagttatttttgtcattttcacacttcaatgaaacataaagacaaaacatcaaaaatatatacatagtgttttacatatgtgtatatttgcacatatatatgtatgtatgtttatatgtattgagactacagaagcacatgtcaccaataagagctcggagacacctttgaccacttacccttatcagatgacatttgccaaatgagttgtagaaacaagtttttttaactgaatttctgagctttgtggatttagaaatgcaaaggaaggtttgtggacattcatgggatcatggttttattctccttaaatctctttgatactttcccattgtctttagtatacatccagaatcttaatgccacccatgaggcttttaaatacctggcttcttatgttgtctccaggctaatcttttaccctctttcccttcagtctctctgctttagtgaactttcttctggtttcctgaagaagttcatcaattcaagcttttgtacatggtatttcctaaacctgaaaatgtgcctcccgttttgtccagacacacaggctccactctgccccctggctcacacctgcttaacctgtcaagtcacatctgaactgtcattcttcaacgggtccttctctggcaccctaatgtaattgagatcatcctattattctctgttctagaactccacacttctgacatttctcattcctgtctaagctcttgtgtgtttggtttttggccatcgctttcactgctctttaagctcccccagcagagtggagaggtctgttttcccttgtttggattcctagaggcagcgcaggcctggcacaaggtcatcactaaggaagtgttcacagggtgaacacggtgggtgctgttgaaggaaccggtaaagcgtgtgggatgagagaaggagcagagagtgtctttagggtggaggctcccaggaggaggctgcgcgggctgcggcgctctgtggatcctcctccttctcctgcttggaggtctccagaacaggctggaggcagggagggggtcccaaaagccttgtaatcattgnnnnnnnnnnnnnnnnnnnnnnnnnnnnnnnnnnnnnnnnnnnnnnnnnnnnnnnnnnnnnnnnnnnnnnnnnnnnnnnnnnnnnnnnnnnnnnnnnnnnnnnnnnnnnnnnnnnnnnnnnnnnnnnnnnnnnnnnnnnnnnnnnnnnnnnnnnnnnnnnnnnnnnnnnnnnnnnnnnnnnnnnnnnnnnnnnnnnnnnnnnnnnnnnnnnnnnnnnnnnnnnnnnnnnnnnnnnnnnnnnnnnnnnnnnnnnnnnnnnnnnnnnnnnnnnnnnnnnnnnnnnnnnnnnnnnnnnnnnnnnnnnnnnnnnnnnnnnnnnnnnnnnnnnnnnnnnnnnnnnnnnnnnnnnnnnnnnnnnnnnnnnnnnnnnnnnnnnnnnnnnnnnnnnnnnnnnnnnnnnnnnnnnnnnnnnnnnnnnnnnnnnnnnnnnnnnnnnnnnnnnnnnnnnnnnnnnnnnnnnnnnnnnnnnnnnnnnnnnnnnnnnnnnnnnnnnnnnnnnnnnnnnnnnnnnnnnnnnnnnnnnnnnnnnnnnnnnnnnnnnnnnnnnnnnnnnnnnnnnnnnnnnnnnnnnnnnnnnnnnnnnnnnnnnnnnnnnnnnnnnnnnnnnnnnnnnnnnnnnnnnnnnnnnnnnnnnnnnnnnnnnnnnnnnnnnnnnnnnnnnnnnnnnnnnnnnnnnnnnnnnnnnnnnnnnnnnnnnnnnnnnnnnnnnnnnnnnnnnnnnnnnnnnnnnnnnnnnnnnnnnnnnnnnnnnnnnnnnnnnnnnnnnnnnnnnnnnnnnnnnnnnnnnnnnnnnnnnnnnnnnnnnnnnnnnnnnnnnnnnnnnnnnnnnnnnnnnnnnnnnnnnnnnnnnnnnnnnnnnnnnnnnnnnnnnnnnnnnnnnnnnnnnnnnnnnnnnnnnnnnnnnnnnnnnnnnnnnnnnnnnnnnnnnnnnnnnnnnnnnnnnnnnnnnnnnnnnnnnnnnnnnnnnnnnnnnnnnnnnnnnnnnnnnnnnnnnnnnnnnnnnnnnnnnnnnnnnnnnnnnnnnnnnnnnnnnnnnnnnnnnnnnnnnnnnnnnnnnnnnnnnnnnnnnnnnnnnnnnnnnnnnnnnnnnnnnnnnnnnnnnnnnnnnnnnnnnnnnnnnnnnnnnnnnnnnnnnnnnnnnnnnnnnnnnnnnnnnnnnnnnnnnnnnnnnnnnnnnnnnnnnnnnnnnnnnnnnnnnnnnnnnnnnnnnnnnnnnnnnnnnnnnnnnnnnnnnnnnnnnnnnnnnnnnnnnnnnnnnnnnnnnnnnnnnnnnnnnnnnnnnnnnnnnnnnnnnnnnnnnnnnnnnnnnnnnnnnnnnnnnnnnnnnnnnnnnnnnnnnnnnnnnnnnnnnnnnnnnnnnnnnnnnnnnnnnnnnnnnnnnnnnnnnnnnnnnnnnnnnnnnnnnnnnnnnnnnnnnnnnnnnnnnnnnnnnnnnnnnnnnnnnnnnnnnnnnnnnnnnnnnnnnnnnnnnnnnnnnnnnnnnnnnnnnnnnnnnnnnnnnnnnnnnnnnnnnnnnnnnnnnnnnnnnnnnnnnnnnnnnnnnnnnnnnnnnnnnnnnnnnnnnnnnnnnnnnnnnnnnnnnnnnnnnnnnnnnnnnnnnnnnnnnnnnnnnnnnnnnnnnnnnnnnnnnnnnnnnnnnnnnnnnnnnnnnnnnnnnnnnnnnnnnnnnnnnnnnnnnnnnnnnnnnnnnnnnnnnnnnnnnnnnnnnnnnnnnnnnnnnnnnnnnnnnnnnnnnnnnnnnnnnnnnnnnnnnnnnnnnnnnnnnnnnnnnnnnnnnnnnnnnnnnnnnnnnnnnnnnnnnnnnnnnnnnnnnnnnnnnnnnnnnnnnnnnnnnnnnnnnnnnnnnnnnnnnnnnnnnnnnnnnnnnnnnnnnnnnnnnnnnnnnnnnnnnnnnnnnnnnnnnnnnnnnnnnnnnnnnnnnnnnnnnnnnnnnnnnnnnnnnnnnnnnnnnnnnnnnnnnnnnnnnnnnnnnnnnnnnnnnnnnnnnnnnnnnnnnnnnnnnnnnnnnnnnnnnnnnnnnnnnnnnnnnnnnnnnnnnnnnnnnnnnnnnnnnnnnnnnnnnnnnnnnnnnnnnnnnnnnnnnnnnnnnnnnnnnnnnnnnnnnnnnnnnnnnnnnnnnnnnnnnnnnnnnnnnnnnnnnnnnnnnnnnnnnnnnnnnnnnnnnnnnnnnnnnnnnnnnnnnnnnnnnnnnnnnnnnnnnnnnnnnnnnnnnnnnnnnnnnnnnnnnnnnnnnnnnnnnnnnnnnnnnnnnnnnnnnnnnnnnnnnnnnnnnnnnnnnnnnnnnnnnnnnnnnnnnnnnnnnnnnnnnnnnnnnnnnnnnnnnnnnnnnnnnnnnnnnnnnnnnnnnnnnnnnnnnnnnnnnnnnnnnnnnnnnnnnnnnnnnnnnnnnnnnnnnnnnnnnnnnnnnnnnnnnnnnnnnnnnnnnnnnnnnnnnnnnnnnnnnnnnnnnnnnnnnnnnnnnnnnnnnnnnnnnnnnnnnnnnnnnnnnnnnnnnnnnnnnnnnnnnnnnnnnnnnnnnnnnnnnnnnnnnnnnnnnnnnnnnnnnnnnnnnnnnnnnnnnnnnnnnnnnnnnnnnnnnnnnnnnnnnntgtaagaggatgataaataggtgccaagtggagcacccaagtgtgatgaaccctctcacagtggaatggggtgggaagctttctgacctcataaattgaagactatcttcagtcattattttacatattttatgtaaattaatcctcatataaccccaagaggtaaattagtataatttaacatacattatacgtgagaaagttgagacacaaaagaattgaaaaactcttccaggatcaaccagtaaaaggcagaccttggatttgaaccaggcagcctggctcacctatcagttttaattaatacacactgtactttcaaagatttgtaaacactttaacaatgcgtgacaatttcaagctatgaagaaacaaacaaaattttttacaacatctctcaaatctgataggtccacactatcacgattaaattccaggctgatgacactgtgagggcgtatggccagctgtgctggaggactggtcgaggccagagcctgggtttacagagaagcaaacaaacagctgaacaacgagactctaacttcctgattcattctctctacctttttttctcctagtgcaacctaaggggactatgtatcctgcaaagaccgagcccctgcatcaccgcaaccccctggtctgctctgtgagtggtttctatccaggcagcattgaagtcaggtggttccagaatggtcaggaagagaaggctgcggtggtctccataggcctgatccagaatggagattggaccttccagaccctggtgatgctggaaacagttcctcggagtggagaggtttacacctgccaagtggagcatccaagcgtgacgagccctctcacagtggaatggagtgagcagctttctgacttcataaatttctcacccaccaagaaggggactgtgctaatccctgagtgtcaggtttctcctctcccaatcctattttcatttgctccatgttctcatctccatcagcacaggtcactgggggtagccctgtaggtgtttctagaaacacctgtacctcctggagaagcagtcacacctgccaggcaggagaggctgtccctcttttgaacctccccatgatagcacaggtcagggtcaccctgtctccctgggctctaggctctgcctctgggtctgagactgtgtttctggtgctgttaatctgagttgtttgttgtgatctgagaagaggagaactgcagggaccttcctgacatgagaggagtccaatctcagctctgccttttattagctctgtcactctagacaaactacttaacctcactgagactcaggctttctgttgatcagattttgaacttgtgccttacatcaagcctgtaatatttgaatgagtttgatgcctggaccttgtaactgttcagtgtgatttgaaaaccatttttcccccagaaaaaaacagttattttagttcttacaggaggtagccttcttccccattttgaaagctctgaatcttagagtctcaattaaagaggttaaatttggaataaaagtcactaaacctggcttcctctctcaggtgcacggactgaatctgcacagagcaagatgctgagtggagttgggggctttgtgctgggcctgctcttccttgggacagggctgttcatctacttcaggaatcagaaaggtgaggagctttccataggcttttctggaggaggaaatttggctttgctaggattagttctcagtatatcagtggccctggataaagtctttctttccccaaatgacctccaatgtcctgataatccagaaatcatcagtgcatgattactatgtcaaagcataatagcttgtggcctgcagagataagagaaaggttaacaagtagtgatcctttggtttgagatcctggagcaaattaaggaagagccactaaggctaatgcaattacactggatcctgtgacagacacctcatgcttcatgggtcacatggtctgtttctgctcttctctgccgtggttggtgtgggttgtggtgttagagaaatctcaggtgggagatctggggctgggacattgtgttggaggacagatttgcttccatatcttttaagtgtatatcttttcctctttttcccaggacactctggacttcagccaacaggtaataccttttaatcctctttcagaaagagattcggtttccctagaatgatggcagaggtgataaggcatgagacagaaataataggaaggactttggatccagatttctgatcaggcaatttacaccaaaactcnnnnnnnnnnnnnnnnnnnnnnnnnnnnnnnnnnnnnnnnnnnnnnnnnnnnnnnnnnnnnnnnnnnnnnnnnnnnnnnnnnnnnnnnnnnnnnnnnnnnnnnnnnnnnnnnnnnnnnnnnnnnnnnnnnnnnnnnnnnnnnnnnnnnnnnnnnnnnnnnnnnnnnnnnnnnnnnnnnnnnnnnnnnnnnnnnnnnnnnnnnnnnnnnnnnnnnnnnnnnnnnnnnnnnnnnnnnnnnnnnnnnnnnnnnnnnnnnnnnnnnnnnnnnnnnnnnnnnnnnnnnnnnnnnnnnnnnnnnnnnnnnnnnnnnnnnnnnnnnnnnnnnnnnnnnnnnnnnnnnnnnnnnnnnnnnnnnnnnnnnnnnnnnnnnnnnnnnnnnnnnnnnnnnnnnnnnnnnnnnnnnnnnnnnnnnnnnnnnnnnnnnnnnnnnnnnnnnnnnnnnnnnnnnnnnnnatttagacattccacactgcaggcatatatcaaaacttcatgctctacaacataaatatactatacaatttttacttgtcaattaaaaaagtaaacctaacgt

SEQ ID NO: 93 - DNA, 1445 bp, Homo sapiens
ggaatgtgggtggaggggttcatagttctccctgagtgagacttgcctgctgctctggcccctggtcctgtcctgttctccagcatggtgtgtctgaggctccctggaggctcctgcatggcagttctgacagtgacactgatggtgctgagctccccactggctttggctggggacaccagaccacgtttcttggaggaggttaagtttgagtgtcatttcttcaatgggacggagcgggtgcggttgctggaaagatacttccataaccaggaggagaacgtgcgcttcgacagcgacgtgggggagttccgggcggtgacggagctggggcggcctgatgccgagtactggaacagccagaaggacctcctggagcagaggcgtgccgcggtggacacctactgcagacacaactacggggttggtgagagcttcacagtgcagcggcgagtccatcctaaggtgactgtgtatccttcaaagacccagcccctgcagcaccataacctcctggtctgttctgtgagtggtttctatccaggcagcattgaagtcaggtggttccggaatggccaggaagagaagactggggtggtgtccacaggcctgatccacaatggagactggaccttccagaccctggtgatgctggaaacagttcctcggagtggagaggtttacacctgccaagtggagcacccaagcgtgacaagccctctcacagtggaatggagagcacggtctgaatctgcacagagcaagatgctgagtggagtcgggggctttgtgctgggcctgctcttccttggggccgggctgttcatctacttcaggaatcagaaaggacactctggacttcagccaagaggattcctgagctgaagtgcagatgacacattcaaagaagaactttctgccccagctttgcaggatgaaaagctttccctcctggctgttattcttccacaagagagggctttctcaggacctggttgctactggttcagcaactgcagaaaatgtcctcccttgtggcttcctcagctcctgttcttggcctgaagccccacagctttgatggcagtgcctcatcttcaacttttgtgctcccctttgcctaaaccctatggcctcctgtgcatctgtactcaccctgtaccacaaacacattacattattaaatgtttctcaaagatggagttaaatatcatctggtccatttggctccaaagacaaaaaatgaaaagaaaagaaaaagggaaggaagattatttcccaatagaataatgattttcatgtatatgtcatgagtgtgtgaggtaatacatatgttaaatagcttgctttagacattccacactataggcatatatcaaaacttcatgctaacataaatatactatacaatttttacttgtcaattaaaaaagtaaacctaacgt

SEQ ID NO: 94 - protein, 262 aa, Homo sapiens
MVCLRLPGGSCMAVLTVTLMVLSSPLAGDWRFLEEVKFECHFFNGTERVRLLERYFHNQEENVRFDSDVGEFRAVTELGRPDAEYWNSQKDLLEQRRAAVDTYCRHNYGVGESFTVQRRVHPKVTVYPSKTQPLQHHNLLVCSVSGFYPGSIEVRWFRNGQEEKTGVVSTGLIHNGDWTFQTLVMLETVPRSGEVYTCQVEHPSVTSPLTVEWRARSESAQSKMLSGVGGFVLGLLFLGAGLFIYFRNQKGHSGLQPRGFLS

SEQ ID NO: 95 - DNA, 10924 bp, Mus musculus
caaaacacctccagcgtctgggttccagaacgctcaaatctgaggtatcccagaaagtcttcttgaagggaaaaggaggagtggaaaggaaaaaggatgtattaaaagggtgtgtgtgtgtgtgtgtgtgtgagggggttgctagcagtaaaacggtggagtgtgaataatggcgtgggcggggttcggagagggataacggaacacctgagtggagcgtggcttgtgggggcgtctggacctgggtgagcagagggcctgtctgtgcaagagtcccgccgtggaatgtgtaggagttaggagcgcagggccagcgcggaaattaggggtacgcagtggggggcccgtgcccccctcccaggctcgcgtgtccgggtgacagttgggaagggtccaaagacgtgctccgccatcgaagccagcagccctggcggccctaggcgtagggtctctgactgggagccggtgaactgttgagggggcggcgaggagcctgggggcggggctgtcgccgggaggaggtggctcccacgggcccggggcggacccagcagagggcgggtttgaaagcgctcgggcgggcgcgggaagcgctggccaagcgcgcagatttcgtcgccggaggtgtccttctccagcaggtgctcgtagggcttgggtgggacatgttggggactccggggtagagagtggagtgtccggcttgccaggagggaaaaggaggcccggtctgccagctccgaggccgcgacagggactttggggtgcggcccccacgcggcgcgtgcagagcagcgccagcacgtggcgcgcatgggcctggctctgggtagggggactctccttttgtggggaccagggcggagctgggcccaagacagcctggcttctgggcctggaagcgactgtcgctgtgttgacttccgcagaggatcggcgtgtgggtagttcaatgctacagtcctgtgtgaactagagggaggggttgtgttgccttctgccccgaggcaggaggatggggaatgcgggaatacaaatggacgtgaagggagctagctggccatttacagactaaactcctgttcctggcctccctttcctgggcgagtcctcatttactctacgcggagagtgaacgtgtgacaagataaaggactgacgcgcacacccaggcttcctttggatgaaggctctctccacccctgcaccttataccccattcgggtcctcttgccaagcctgagccaaccccctcttctccattaaccctccttccgtcctgttcctcttgtcctgcttgtgtgacctttgcatacaataatatatgcgtggtggaatggttgtgagttgtcatgactctgaaactaatgttatgtgaaagaatggcctgaatctcccacttgttttaaccctttaattggagcactgttgccttcctggaagcctacacgaatagctgaggagccttgttaattttgccttccccacttgagaaggaatctagaatgatcggtacattgagtattgatgctgtcacccccattcaccagctctgcgggctttctcaagtgatggagcctctttaaacctcaatcgccctaactgtttagtagaaacggggcagctggaagaggggcatcctcagatttcaagagaagattccgatgtagcagaaactaggctgagaaactgagctatgtgagaggacccttaggacgcaggaaggcctcagatgggcgatagctttcagggcctctccatctcggcaggtcaaggcatggctgaaatgataccagaggccctgaactgctatcagatctctactgggacaaaagtaaagaaagcccctaagcagcaaatggaatgtttggatgtgggtggaacccgagaggtgggaatttctgcaaggggagaagtgatgtgtgtgtgtgtgtgtgtgtgtgtgtgtgtgtgtgtgtgtgtgtgtatatgtatgtgtatacttgtccaagcctaagccagttttatgatggaagagttagcctccctctggcttgtggctgtattcacttttgctggtgcatgggagaggtgtggggtgctcggtggagaattagctatgttttgatggggtcccttccctactatctaatagaaacctgagtcctcaggctccccgcagccgcagcagaaccctcttgtcctagataaatagcagtgctactgtttgctgctgctctgtccccagtgcctaggaggatgcctggcggacccacagagaccctcagcaaatagtccttaaccaacagcaggagccttctgcctccttctggaggtgtgtggctttgctgtccagcactgagggatttggcccgtctgggtttcacccacagcagaatagaaaagcggctatagggcctcagggtgaccagctgtgacgcctgtctgggtgggcggggactgaagttctagctgcacctgagagctgacctggctgccacaggcttagatcccctgctgagccggttgcttgggctgctgtcttatctcccagctacagggtggccctttatctctcccagcttcgctggtacttttagcttctgcagcttcttagcttgtgagacccccgctgaatgggggccccttgaggcctgagggattctctcccgataagccttggccaacttttccactctggaccctcacctaggacccaacctcctgcctgagcctgagccaggaccccttcctggggaacgcccaggtacctttggctctcaccgtcctgccaacatcgagtctataaatttggtgagtgatgagatggggatctagagcagcttgccctagacaaagaaatagcagtctgatgggtggggtgtcccttgaatatgcttcttccttacaggactagcccactggtgctgttatctcctctttgagagtgaggcacagggcagcatgtcaagggtttggttaggagctctgggagcacgatgctagctttccaaatttcccttcaaagccactgtcagacacgggaagaggatagttagtggccttggactgagaaaggaactgggggtgggggggggaagaaaggaacattctggaactggaggtcaaggaaaggaacttgctgtggagaagtctgtgtccctcccacagttatgaaatatattcctggagaactcaggaagcccctaggcagcagctggaaaggcgtagaggctggctccagcagaggctggctccagcagaggctggctccagcagaggctggagggagtcccgattactctaggaagcagtctgcgaagggaaggccctccctgccacagtcttgattgggtgatggggtgggggcacccaggaggggagagtgcaggctcatggcaggcctcaggagacctgtgttccttacagggtctgtttgctctctcactctttctccctttttcccctctgctctgtctcctcccctttgcctgctctgtcactgttgtcactgtccctgaccccttttctcttttctgtcttctttgactgtctttccctgcctctcaatcatccgtcctcctcctcctcctcgattgctccccacccttcggtttccaagcttataaactgcttctgctgctggataaaaatagcggtggcagcggccaggctggcagccaggtgcagcccaatcaggcagagagacgacaggaaggccttcctggggccaaaggccagatggggctgagttgagtggtcctgagtctgcagaggcttcccttgcctactctgtgtccagctctaccccccccccccaagagaaaggcccagggcagtgtggaagcagagccagacagggctcgatattcctttacccccagcaagagccagagggagggagctgccagccaggcacagccgagaacactggagccatgacaaccagtcaccagcctcaggacaggtactgggtggccaaggggtgtgacggagggtggttgcagggaggggggagccggtctggagatctggggagtgagtctctagggtaagggtgggagggagggaggtgcggtgtttgggacttgagggaggggacctcaggactaactgtgttcccagcctggtggttctgagtcagttctgcatggggtagggtggagaacatgcatgccctggctgggtgctggctagcatgcccgcagggctaggtgagcagtaggtccctattggagtgtctcagtctttccactgttatgcgcagctagacagcagcttccagctcctcccaccatcactgtggggagacacttggctgcttccctcattccagaacacatctggcaggactacccctgtccctgggggtcgcccttgcatgacctcagcccacgctgctctctggcctgacccttccagccttctagctccggagcttgggatcttcctcaagctagttaaggtccggaatgcgtgctaggatggaaaaggagcttgagtctagtccttcagaggggctgaggcttgtggaagtttatgaagccatgatacactctttccagatggcccctctgtcctgttgggtctctgaacctctcacggctcccctgcccaccattttcctcttgtgctatgtaactaggcccattctgactggagagttagctgcatctttctgggaccatttctccatcctgtaaagtctggtgagaacaccagccttctgtgactgttttctgaggggaagaattgtcattgtcattgtaggttccagcttcctgcctcctttccttcccaggctgcctggtgccctggcctcttcaacaatctacccatttcactgctgcctggctcagcagctcttctctgacctcctgtccttgtataaccttccctcggaattttaccttccatctgagcctttgaaccaagccttgagcatcttgacctcaaagggaatggatgagggctttgaaggctgtggtgtggccatggcttagactggcgaatttggttgctcttctggctgtcccatttcaggcttgcaagaggcctgttccactgagttgggtctctgctaccatctctgtgcagcctgtagatgccggctaaggggaaggtattttaccaggcataggcaactgtaatggaagggaccagggccactaagcttacaggcaaagactgtccgaagtcatgctcagaaccagatggcagccataagtcctaatctatctgccctgccgtaggtagtttggactataaaactggttctgtctgtctaatatctaataagggaaaaaaaaattctatagctctctacttcctagtccccaccccctacccccagccatgtgacccactgggtctagaattgtctgggtgttgttttttgacctcaagagttcttgagagaactggcgttcccgcttagacagcttaactacttccagctggtgtggtggggctggggcttgtgcccactgccctttacccgcccacctttaacagaggttccaacaccagctctggaagtgtgggtcatcacactgcttccccgatcacccagccccctgaaccttctaggacttgggaacaaaggttctgtctcccgtgtcattcagaactgccaccagcccttttccttcaacccatcttacagcctgtcctgtacccaggacctacacatccctcacacctctgcaggagggcgcctacttgtggatacacacagctgggaccgctgggtagacgggagggaggggaggtgggctgactgatcactttgcctttttcctacgcaggtataaggcagtatggcttatcttctttgtgctgggcctggggacactgctcccctggaatttttttatgaccgcaaccaaggtgaggttggagtgggggtcaggtactaggctccagaggacatgttccttaggctttcaaggcctggttctgtgcctctgggcacagagagggacagaggtcccaacactcaacctctgcaaaccccacagtatttcacaaaccgcctggacgtgtcccagaatgtgtcctcggacactgatcaatcatgcgaaagcaccaaggccttggctgaccccacagtggccttgccagcccggagttctctcagtgccatcttcaacaatgtcatgaccctgtgtgccatgctgcccttgctggtcttcacctgcctcaactcgtttctgcatcagcggtgagcctccccgtccatgatgcccagccagctcctgcttcctcagccccaggctgacccttcctgacaccccaccaccaccaccacccctgcctctcctaggatctctcaatctgttcggatcttgggcagcctgctggcaatcctgctggtattccttgtcactgccgccctggtgaaggtggagatggatgctctgatcttctttgtcatcaccatgatcaagattgtgctcatcaattgtaatcgggaggggacgggatggacagccatgggcctgggttgagatcagggtgggggtggttcaggttaaagcttcctgggaagccctgattgccagcctctgctgacaagctgtctttgctactccccagcatttggtgccattttgcaagccagcctttttggtctggcaggtgtcctgccagccaactacacagcccccatcatgagtggccagggcctggctggcttcttcacctctgtcgccatgatctgtgccattgccagtgagtccaactgcgcgcgcactgccctgctttgctggttgtggggaggcagggtagggtgatttggaagggtggagcgtatctgagcttgtgcactgtctgcgccaggtggttctgagctgtcagaaagcgcctttggctacttcatcacagcctgtgcagttgtcattttggccatcctgtgctacctggctctgcctcggacggtgagcaaatggggggatttggggaggcctcggggtttcaaagcaagggtgtctggaaactaaaggatggcaagctcggatgcctagagctgccctgactctacttacttctcccatctcccttgctgaacaggaattctatcgccattacctgcagctcaaccttgcggggcctgcagagcaggagaccaagttggatctcataagtaaaggtcttaattactaaaggaagtctggtagggcggtaggatgggagtgggagggttgtgggcatgttgtgttaactggcagctgggagccaaaggaggacactcgggccgtgagtgggtagggagaggggaaaagaggggtgagccagggaagatagcgcagatgccttgcagggtcttggcgtgttgctcggttggtaagagtgggtgcacaaaggcctgagtttgattcctgcactgggcaaggtggtgcacatgtaaccttagcgtttgggaaggagaggcaggaggactgtattcaaggtcatccttggctatacagtgagttcaaggccagcctgacctacatgacatcttgatgaagaaagaagggaaacttgggtcaccctgaatgtctcgggcattcggacagaggtcagcggcttcagagggaacagagaatgacaggagcctcctgggggaagggtcagtccccaggggctcgagtcaagggttattagggtagaactgcggactagccagttaagggaggtgcccacctccagctcattctacctgttgttctgtcctccccaaaacttaaagatccttttacaacctctcacccgacaggagaggagccaaaaggaagaagagaggaatctggggtgccaggccccaactctccacccaccaacagaaaccagtctatcaaagccatacttaagagtgtacgtgggcccggggtgtcctgcctacccttcctcacccttctttctccttttgctgtttctaccttataccacttccctttctgatctaagactgggctttctcctgtcttcctatgaatgctgtgtgtgtgtctgtctgtctgtctgtctgtgagatttaaaaaaaaaagatttatttatttattatacataagtacattgtagttgtcttcagacaccacagaagagggcaacagatctcattacagatggttgtgagccaccatgtaattgctgggaattgaactcaggaccttcaaaagagcagtccgtgcttttaactgctgagccatctctccagccccatctctgagatttacttatttatttatttatttatttatttatttatttattgttttttcaagaacagggttttgatgtagccctggttgtcttggaactcactctgtagaccaggctggccttgaactcagagatcagcctgcctctgcctcctgagttctgggattaaaaaggggtatggtaccagtgtctggctctttggtcttttgtacacagagccatgacaacctagggccctgtatgaatctctcttctcttctctctctccagatctgtgtcccggctctgtctgtctgcttcatcttcacggttaccattgggttgttccctgctgtgactgctgaggtggaatccagcatcgcaggcacaagtccctggagtatgtgtgtcccttgccccctcccagcccccccccccagcccccgcacttccctcctaggacggattcacccagagtctaaagtggaatcatgggtggggtatgggcaacctctggggctccctctgcccagctggatctacacgggcctactagacaccctgccattggatggaaacctctgaggcagaatgaagagtcctaggcccagagagggccagttgctaagtcttaagtctctttcctagaaagctacttcattcccgtggcctgtttcttgaatttcaatgtctttgactggctaggccggagcctcactgctgtctgcatgtgggtgagtacagcatgggcggcagggctgtggggttcaggtgtccagctgaggccaagagggaacccaagaaagtatggtggctgcagtgtggctctgtgactgatagagggcttgctagcatgcatggcccctgggtcccatctgtaaaactgcaagaagggaaaatggagggggtggggcagtggctcaacaggttaagagcactgactgctcttccagagatcctgagttcaattcccagcagccacaacggtggctcacaaccatctgtaatgggatctgatgccctcttctggtgcatctgaagacagctaccagtgtactcatcaaaaacaaaaaacctgcaagaagggaaaaataccgtgtactactcataacttatgtgtaactctgtgtacaagttcattcgtttgtttatctgtctgtagaggcagggtctctgtgtgttgctatctgggaatttactctgtagaccaggctggcctggaactcagatctctttactccctgcttcccaagtgcatgtgccaccagctaagactttcaaattatgtgtgtgtgcatgtgaatgcaatgcccacagaggccagaagagggcaccagatcccctggagctggagttagaggagcttgtgaggactggaaactaaacctgggtcttccgcaagagcaggactcttaactattgagccattcctggcccatgcgtacagttcttaggtgtgtagcctggcagaggtgtgcatgtcatggctcccacctagatggaaagatacatctcgacatatcataggcaccactgcgcccctagcaatcagcacccccaaaggcacccaggcctagtggttttatccaagtccccaggggccccaggagaccgggaggactgacatgcgtgctgaagccttgcctgtgtccgcagcctggccaggatagccgctggctgccggttttggtcgcctcgaggattgtgtttattcccctgctgatgctctgcaacgtgaaggctcgccactgcggcgcgcagcggcaccacttcgtctttaagcatgacgcctggttcatcgccttcatggctgcctttgccttctccaatggctacctcgccagcctctgcatgtgcttcgggcccaagtgagtcgggccatgaggggatttggtgacatcaggcaggacttacagggagatggcagtaggagagtccctccccatctcatagctgcacggagttggagttgctggggggttttaaggggcagtggaggtaagggcttgctaatgtgctcctgctgagctgtgtgggaagggattaagacagggtggaggatggtccctagacacagtctcccaagaagtgggctgggattgggagtgttggaaggtttgggggtggggggacagggctgggctcagcttgcctaagattaccctgcctttccttttaggaaagtcaaaccagctgaggcggagacagcaggaaacatcatgtccttctttctgtgtctgggcctggctctgggagctgtgttgtccttcttgttaagggcacttgtgtgaccctgtggggacagaagaactacactgcctgcttcctgctcacttccttccctgccagggacgagcaggggtcgagaggggctgttcttctagctgacttctgctttcctctggactgtgcttcgcccagctgtccaggagccagcgatggcctgcgggtggacttggaattcagggtcagaatggcaagggctcaatggcctctgactgacagctccgactgatgcccgcttactccaagcacaagagactccagggccaagagagatctgtccgcctgcctatcacaggatagggcggaggcggatggctgattggtgtcgtgtgacctgatgtccctccccttgcccttcttccttctgtgcctgttccatgtccccagcccttgtcattttactgccttttttatactgacagaaaccaggtgccttcagaggccatctgattaaataaacattttttttctccat

SEQ ID NO: 96 - DNA, 1380 bp, Mus musculus
tacccccagcaagagccagagggagggagctgccagccaggcacagccgagaacactggagccatgacaaccagtcaccagcctcaggacaggtataaggcagtatggcttatcttctttgtgctgggcctggggacactgctcccctggaatttttttatgaccgcaaccaagtatttcacaaaccgcctggacgtgtcccagaatgtgtcctcggacactgatcaatcatgcgaaagcaccaaggccttggctgaccccacagtggccttgccagcccggagttctctcagtgccatcttcaacaatgtcatgaccctgtgtgccatgctgcccttgctgagatcagcctgcctctgcctcctgagttctgggattaaaaaggggtatgatctgtgtcccggctctgtctgtctgcttcatcttcacggttaccattgggttgttccctgctgtgactgctgaggtggaatccagcatcgcaggcacaagtccctggaaaagctacttcattcccgtggcctgtttcttgaatttcaatgtctttgactggctaggccggagcctcactgctgtctgcatgtggcctggccaggatagccgctggctgccggttttggtcgcctcgaggattgtgtttattcccctgctgatgctctgcaacgtgaaggctcgccactgcggcgcgcagcggcaccacttcgtctttaagcatgacgcctggttcatcgccttcatggctgcctttgccttctccaatggctacctcgccagcctctgcatgtgcttcgggcccaagaaagtcaaaccagctgaggcggagacagcaggaaacatcatgtccttctttctgtgtctgggcctggctctgggagctgtgttgtccttcttgttaagggcacttgtgtgaccctgtggggacagaagaactacactgcctgcttcctgctcacttccttccctgccagggacgagcaggggtcgagaggggctgttcttctagctgacttctgctttcctctggactgtgcttcgcccagctgtccaggagccagcgatggcctgcgggtggacttggaattcagggtcagaatggcaagggctcaatggcctctgactgacagctccgactgatgcccgcttactccaagcacaagagactccagggccaagagagatctgtccgcctgcctatcacaggatagggcggaggcggatggctgattggtgtcgtgtgacctgatgtccctccccttgcccttcttccttctgtgcctgttccatgtccccagcccttgtcattttactgccttttttatactgacagaaaccaggtgccttcagaggccatctgattaaataaacattttttttctccat

SEQ ID NO: 97 - protein, 129 aa, Mus musculus
MTTSHQPQDRYKAVWLIFFVLGLGTLLPWNFFMTATKYFTNRLDVSQNVSSDTDQSCESTKADPTVPARSSLSAIFNNVMTLCAMLPLLRSACLCLLSSGIKKGYDLCPGSVCLLHLHGYHWVVPCCDC

SEQ ID NO: 98 - DNA, 2077 bp, Mus musculus
caggcttagatcccctgctgagccggttgcttgggctgctgtcttatctcccagctacagggtggccctttatctctcccagcttcgctggacccaacctcctgcctgagcctgagccaggaccccttcctggggaacgcccaggtacctttggctctcaccgtcctgccaacatcgagtctataaatttgcaagagccagagggagggagctgccagccaggcacagccgagaacactggagccatgacaaccagtcaccagcctcaggacaggtataaggcagtatggcttatcttctttgtgctgggcctggggacactgctcccctggaatttttttatgaccgcaaccaagtatttcacaaaccgcctggacgtgtcccagaatgtgtcctcggacactgatcaatcatgcgaaagcaccaaggccttggctgaccccacagtggccttgccagcccggagttctctcagtgccatcttcaacaatgtcatgaccctgtgtgccatgctgcccttgctggtcttcacctgcctcaactcgtttctgcatcagcggatctctcaatctgttcggatcttgggcagcctgctggcaatcctgctggtattccttgtcactgccgccctggtgaaggtggagatggatgctctgatcttctttgtcatcaccatgatcaagattgtgctcatcaattcatttggtgccattttgcaagccagcctttttggtctggcaggtgtcctgccagccaactacacagcccccatcatgagtggccagggcctggctggcttcttcacctctgtcgccatgatctgtgccattgccagtggttctgagctgtcagaaagcgcctttggctacttcatcacagcctgtgcagttgtcattttggccatcctgtgctacctggctctgcctcggacggaattctatcgccattacctgcagctcaaccttgcggggcctgcagagcaggagaccaagttggatctcataagtaaaggagaggagccaaaaggaagaagagaggaatctggggtgccaggccccaactctccacccaccaacagaaaccagtctatcaaagccatacttaagagtatctgtgtcccggctctgtctgtctgcttcatcttcacggttaccattgggttgttccctgctgtgactgctgaggtggaatccagcatcgcaggcacaagtccctggaaaagctacttcattcccgtggcctgtttcttgaatttcaatgtctttgactggctaggccggagcctcactgctgtctgcatgtggcctggccaggatagccgctggctgccggttttggtcgcctcgaggattgtgtttattcccctgctgatgctctgcaacgtgaaggctcgccactgcggcgcgcagcggcaccacttcgtctttaagcatgacgcctggttcatcgccttcatggctgcctttgccttctccaatggctacctcgccagcctctgcatgtgcttcgggcccaagaaagtcaaaccagctgaggcggagacagcaggaaacatcatgtccttctttctgtgtctgggcctggctctgggagctgtgttgtccttcttgttaagggcacttgtgtgaccctgtggggacagaagaactacactgcctgcttcctgctcacttccttccctgccagggacgagcaggggtcgagaggggctgttcttctagctgacttctgctttcctctggactgtgcttcgcccagctgtccaggagccagcgatggcctgcgggtggacttggaattcagggtcagaatggcaagggctcaatggcctctgactgacagctccgactgatgcccgcttactccaagcacaagagactccagggccaagagagatctgtccgcctgcctatcacaggatagggcggaggcggatggctgattggtgtcgtgtgacctgatgtccctccccttgcccttcttccttctgtgcctgttccatgtccccagcccttgtcattttactgccttttttatactgacagaaaccaggtgccttcagaggccatctgattaa

SEQ ID NO: 99 - protein, 456 aa, Mus musculus
MTTSHQPQDRYKAVWLIFFVLGLGTLLPWNFFMTATKYFTNRLDVSQNVSSDTDQSCESTKADPTVPARSSLSAIFNNVMTLCAMLPLLVFTCLNSFLHQRISQSVRILGSLLAILLVFLVTAALVKVEMDALIFFVITMIKIVLINSFGAILQASLFGLAGVLPANYTAPIMSGQGLAGFFTSVAMICAIASGSELSESAFGYFITACAVVILAILCYLALPRTEFYRHYLQLNLAGPAEQETKLDLISKGEEPKGRREESGVPGPNSPPTNRNQSIKAILKSICVPALSVCFIFTVTIGLFPAVTAEVESSIAGTSPWKSYFIPVACFLNFNVFDWLGRSLTAVCMWPGQDSRWLPVLVASRIVFIPLLMLCNVKARHCGAQRHHFVFKHDAWFIAFMAAFAFSNGYLASLCMCFGPKKVKPAEAETAGNIMSFFLCLGLALGAVLSFLLRALV

SEQ ID NO: 100 - DNA, 2272 bp, Mus musculus
gggtgaccagctgtgacgcctgtctgggtgggcggggactgaagttctagctgcacctgagagctgacctggctgccacaggcttagatcccctgctgagccggttgcttgggctgctgtcttatctcccagctacagggtggccctttatctctcccagcttcgctggtacttttagcttctgcagcttcttagcttgtgagacccccgctgaatgggggccccttgaggcctgagggattctctcccgataagccttggccaacttttccactctggaccctcacctaggacccaacctcctgcctgagcctgagccaggaccccttcctggggaacgcccaggtacctttggctctcaccgtcctgccaacatcgagtctataaatttgcaagagccagagggagggagctgccagccaggcacagccgagaacactggagccatgacaaccagtcaccagcctcaggacaggtataaggcagtatggcttatcttctttgtgctgggcctggggacactgctcccctggaatttttttatgaccgcaaccaagtatttcacaaaccgcctggacgtgtcccagaatgtgtcctcggacactgatcaatcatgcgaaagcaccaaggccttggctgaccccacagtggccttgccagcccggagttctctcagtgccatcttcaacaatgtcatgaccctgtgtgccatgctgcccttgctggtcttcacctgcctcaactcgtttctgcatcagcggatctctcaatctgttcggatcttgggcagcctgctggcaatcctgctggtattccttgtcactgccgccctggtgaaggtggagatggatgctctgatcttctttgtcatcaccatgatcaagattgtgctcatcaattcatttggtgccattttgcaagccagcctttttggtctggcaggtgtcctgccagccaactacacagcccccatcatgagtggccagggcctggctggcttcttcacctctgtcgccatgatctgtgccattgccagtggttctgagctgtcagaaagcgcctttggctacttcatcacagcctgtgcagttgtcattttggccatcctgtgctacctggctctgcctcggacggaattctatcgccattacctgcagctcaaccttgcggggcctgcagagcaggagaccaagttggatctcataagagaggagccaaaaggaagaagagaggaatctggggtgccaggccccaactctccacccaccaacagaaaccagtctatcaaagccatacttaagagtatctgtgtcccggctctgtctgtctgcttcatcttcacggttaccattgggttgttccctgctgtgactgctgaggtggaatccagcatcgcaggcacaagtccctggaaaagctacttcattcccgtggcctgtttcttgaatttcaatgtctttgactggctaggccggagcctcactgctgtctgcatgtggcctggccaggatagccgctggctgccggttttggtcgcctcgaggattgtgtttattcccctgctgatgctctgcaacgtgaaggctcgccactgcggcgcgcagcggcaccacttcgtctttaagcatgacgcctggttcatcgccttcatggctgcctttgccttctccaatggctacctcgccagcctctgcatgtgcttcgggcccaagaaagtcaaaccagctgaggcggagacagcaggaaacatcatgtccttctttctgtgtctgggcctggctctgggagctgtgttgtccttcttgttaagggcacttgtgtgaccctgtggggacagaagaactacactgcctgcttcctgctcacttccttccctgccagggacgagcaggggtcgagaggggctgttcttctagctgacttctgctttcctctggactgtgcttcgcccagctgtccaggagccagcgatggcctgcgggtggacttggaattcagggtcagaatggcaagggctcaatggcctctgactgacagctccgactgatgcccgcttactccaagcacaagagactccagggccaagagagatctgtccgcctgcctatcacaggatagggcggaggcggatggctgattggtgtcgtgtgacctgatgtccctccccttgcccttcttccttctgtgcctgttccatgtccccagcccttgtcattttactgccttttttatactgacagaaaccaggtgccttcagaggccatctgattaa

SEQ ID NO: 101 - protein, 454 aa, Mus musculus
MTTSHQPQDRYKAVWLIFFVLGLGTLLPWNFFMTATKYFTNRLDVSQNVSSDTDQSCESTKADPTVPARSSLSAIFNNVMTLCAMLPLLVFTCLNSFLHQRISQSVRILGSLLAILLVFLVTAALVKVEMDALIFFVITMIKIVLINSFGAILQASLFGLAGVLPANYTAPIMSGQGLAGFFTSVAMICAIASGSELSESAFGYFITACAVVILAILCYLALPRTEFYRHYLQLNLAGPAEQETKLDLIREEPKGRREESGVPGPNSPPTNRNQSIKAILKSICVPALSVCFIFTVTIGLFPAVTAEVESSIAGTSPWKSYFIPVACFLNFNVFDWLGRSLTAVCMWPGQDSRWLPVLVASRIVFIPLLMLCNVKARHCGAQRHHFVFKHDAWFIAFMAAFAFSNGYLASLCMCFGPKKVKPAEAETAGNIMSFFLCLGLALGAVLSFLLRALV

SEQ ID NO: 102 - DNA, 1924 bp, Mus musculus
caaaacacctccagcgtctgggttccagaacgctcaaatctgagcaagagccagagggagggagctgccagccaggcacagccgagaacactggagccatgacaaccagtcaccagcctcaggacaggtataaggcagtatggcttatcttctttgtgctgggcctggggacactgctcccctggaatttttttatgaccgcaaccaagtatttcacaaaccgcctggacgtgtcccagaatgtgtcctcggacactgatcaatcatgcgaaagcaccaaggccttggctgaccccacagtggccttgccagcccggagttctctcagtgccatcttcaacaatgtcatgaccctgtgtgccatgctgcccttgctggtcttcacctgcctcaactcgtttctgcatcagcggatctctcaatctgttcggatcttgggcagcctgctggcaatcctgctggtattccttgtcactgccgccctggtgaaggtggagatggatgctctgatcttctttgtcatcaccatgatcaagattgtgctcatcaattcatttggtgccattttgcaagccagcctttttggtctggcaggtgtcctgccagccaactacacagcccccatcatgagtggccagggcctggctggcttcttcacctctgtcgccatgatctgtgccattgccagtggttctgagctgtcagaaagcgcctttggctacttcatcacagcctgtgcagttgtcattttggccatcctgtgctacctggctctgcctcggacggaattctatcgccattacctgcagctcaaccttgcggggcctgcagagcaggagaccaagttggatctcataagagaggagccaaaaggaagaagagaggaatctggggtgccaggccccaactctccacccaccaacagaaaccagtctatcaaagccatacttaagagtatctgtgtcccggctctgtctgtctgcttcatcttcacggttaccattgggttgttccctgctgtgactgctgaggtggaatccagcatcgcaggcacaagtccctggaaaagctacttcattcccgtggcctgtttcttgaatttcaatgtctttgactggctaggccggagcctcactgctgtctgcatgtggcctggccaggatagccgctggctgccggttttggtcgcctcgaggattgtgtttattcccctgctgatgctctgcaacgtgaaggctcgccactgcggcgcgcagcggcaccacttcgtctttaagcatgacgcctggttcatcgccttcatggctgcctttgccttctccaatggctacctcgccagcctctgcatgtgcttcgggcccaagaaagtcaaaccagctgaggcggagacagcaggaaacatcatgtccttctttctgtgtctgggcctggctctgggagctgtgttgtccttcttgttaagggcacttgtgtgaccctgtggggacagaagaactacactgcctgcttcctgctcacttccttccctgccagggacgagcaggggtcgagaggggctgttcttctagctgacttctgctttcctctggactgtgcttcgcccagctgtccaggagccagcgatggcctgcgggtggacttggaattcagggtcagaatggcaagggctcaatggcctctgactgacagctccgactgatgcccgcttactccaagcacaagagactccagggccaagagagatctgtccgcctgcctatcacaggatagggcggaggcggatggctgattggtgtcgtgtgacctgatgtccctccccttgcccttcttccttctgtgcctgttccatgtccccagcccttgtcattttactgccttttttatactgacagaaaccaggtgccttcagaggccatctgattaa

SEQ ID NO: 103 - protein, 454 aa, Mus musculus; identical to SEQ ID NO: 101

SEQ ID NO: 104 - DNA, 1946 bp, Mus musculus
gcgcgggaagcgctggccaagcgcgcagatttcgtcgccggaggtgtccttctccagcagcaagagccagagggagggagctgccagccaggcacagccgagaacactggagccatgacaaccagtcaccagcctcaggacaggtataaggcagtatggcttatcttctttgtgctgggcctggggacactgctcccctggaatttttttatgaccgcaaccaagtatttcacaaaccgcctggacgtgtcccagaatgtgtcctcggacactgatcaatcatgcgaaagcaccaaggccttggctgaccccacagtggccttgccagcccggagttctctcagtgccatcttcaacaatgtcatgaccctgtgtgccatgctgcccttgctggtcttcacctgcctcaactcgtttctgcatcagcggatctctcaatctgttcggatcttgggcagcctgctggcaatcctgctggtattccttgtcactgccgccctggtgaaggtggagatggatgctctgatcttctttgtcatcaccatgatcaagattgtgctcatcaattcatttggtgccattttgcaagccagcctttttggtctggcaggtgtcctgccagccaactacacagcccccatcatgagtggccagggcctggctggcttcttcacctctgtcgccatgatctgtgccattgccagtggttctgagctgtcagaaagcgcctttggctacttcatcacagcctgtgcagttgtcattttggccatcctgtgctacctggctctgcctcggacggaattctatcgccattacctgcagctcaaccttgcggggcctgcagagcaggagaccaagttggatctcataagtaaaggagaggagccaaaaggaagaagagaggaatctggggtgccaggccccaactctccacccaccaacagaaaccagtctatcaaagccatacttaagagtatctgtgtcccggctctgtctgtctgcttcatcttcacggttaccattgggttgttccctgctgtgactgctgaggtggaatccagcatcgcaggcacaagtccctggaaaagctacttcattcccgtggcctgtttcttgaatttcaatgtctttgactggctaggccggagcctcactgctgtctgcatgtggcctggccaggatagccgctggctgccggttttggtcgcctcgaggattgtgtttattcccctgctgatgctctgcaacgtgaaggctcgccactgcggcgcgcagcggcaccacttcgtctttaagcatgacgcctggttcatcgccttcatggctgcctttgccttctccaatggctacctcgccagcctctgcatgtgcttcgggcccaagaaagtcaaaccagctgaggcggagacagcaggaaacatcatgtccttctttctgtgtctgggcctggctctgggagctgtgttgtccttcttgttaagggcacttgtgtgaccctgtggggacagaagaactacactgcctgcttcctgctcacttccttccctgccagggacgagcaggggtcgagaggggctgttcttctagctgacttctgctttcctctggactgtgcttcgcccagctgtccaggagccagcgatggcctgcgggtggacttggaattcagggtcagaatggcaagggctcaatggcctctgactgacagctccgactgatgcccgcttactccaagcacaagagactccagggccaagagagatctgtccgcctgcctatcacaggatagggcggaggcggatggctgattggtgtcgtgtgacctgatgtccctccccttgcccttcttccttctgtgcctgttccatgtccccagcccttgtcattttactgccttttttatactgacagaaaccaggtgccttcagaggccatctgattaa

SEQ ID NO: 105 - protein, 456 aa, Mus musculus; identical to SEQ ID NO: 99

SEQ ID NO: 106 - DNA, 2061 bp, Mus musculus
gtttgaaagcgctcgggcgggcgcgggaagcgctggccaagcgcgcagatttcgtcgccggaggtgtccttctccagcaggacccaacctcctgcctgagcctgagccaggaccccttcctggggaacgcccaggtacctttggctctcaccgtcctgccaacatcgagtctataaatttgcaagagccagagggagggagctgccagccaggcacagccgagaacactggagccatgacaaccagtcaccagcctcaggacaggtataaggcagtatggcttatcttctttgtgctgggcctggggacactgctcccctggaatttttttatgaccgcaaccaagtatttcacaaaccgcctggacgtgtcccagaatgtgtcctcggacactgatcaatcatgcgaaagcaccaaggccttggctgaccccacagtggccttgccagcccggagttctctcagtgccatcttcaacaatgtcatgaccctgtgtgccatgctgcccttgctggtcttcacctgcctcaactcgtttctgcatcagcggatctctcaatctgttcggatcttgggcagcctgctggcaatcctgctggtattccttgtcactgccgccctggtgaaggtggagatggatgctctgatcttctttgtcatcaccatgatcaagattgtgctcatcaattcatttggtgccattttgcaagccagcctttttggtctggcaggtgtcctgccagccaactacacagcccccatcatgagtggccagggcctggctggcttcttcacctctgtcgccatgatctgtgccattgccagtggttctgagctgtcagaaagcgcctttggctacttcatcacagcctgtgcagttgtcattttggccatcctgtgctacctggctctgcctcggacggaattctatcgccattacctgcagctcaaccttgcggggcctgcagagcaggagaccaagttggatctcataagagaggagccaaaaggaagaagagaggaatctggggtgccaggccccaactctccacccaccaacagaaaccagtctatcaaagccatacttaagagtatctgtgtcccggctctgtctgtctgcttcatcttcacggttaccattgggttgttccctgctgtgactgctgaggtggaatccagcatcgcaggcacaagtccctggaaaagctacttcattcccgtggcctgtttcttgaatttcaatgtctttgactggctaggccggagcctcactgctgtctgcatgtggcctggccaggatagccgctggctgccggttttggtcgcctcgaggattgtgtttattcccctgctgatgctctgcaacgtgaaggctcgccactgcggcgcgcagcggcaccacttcgtctttaagcatgacgcctggttcatcgccttcatggctgcctttgccttctccaatggctacctcgccagcctctgcatgtgcttcgggcccaagaaagtcaaaccagctgaggcggagacagcaggaaacatcatgtccttctttctgtgtctgggcctggctctgggagctgtgttgtccttcttgttaagggcacttgtgtgaccctgtggggacagaagaactacactgcctgcttcctgctcacttccttccctgccagggacgagcaggggtcgagaggggctgttcttctagctgacttctgctttcctctggactgtgcttcgcccagctgtccaggagccagcgatggcctgcgggtggacttggaattcagggtcagaatggcaagggctcaatggcctctgactgacagctccgactgatgcccgcttactccaagcacaagagactccagggccaagagagatctgtccgcctgcctatcacaggatagggcggaggcggatggctgattggtgtcgtgtgacctgatgtccctccccttgcccttcttccttctgtgcctgttccatgtccccagcccttgtcattttactgccttttttatactgacagaaaccaggtgccttcagaggccatctgattaa

SEQ ID NO: 107 - protein, 454 aa, Mus musculus; identical to SEQ ID NO: 101

SEQ ID NO: 108 - DNA, 15578 bp, Homo sapiens
cggagctctgggcgggcgctggggtcgcctgttgcagcctctcttccgcccggcggcccacaccggtcaggcccggcgcgggctgcgctctccagctgtggctatggccccagccccgagatgaggagggagagaactaggggcccgcaggcctgggaatttccgtcccccaccaagtccggatgctcactccaaagtctcagcaggtgcgcggggcggggccggggggcctggcggggcggggtggggtgggggcgaggtctgcgccgttctcacgctgccgggcgggacagggggccagtagggggacccgctgggctacagtgtctcaggggagtcagaatctttggtttctggatgcggggccacttttctgggccttcgaaggccattattagatgactgcctccccaaactccccagccacttacagatgtcccaggaacatagggtagggggaagaggtctggaaaattagcctagaagaccagcccagacctaactgaacaaagaatttagtcttctcgaaccccgagccagtacccacactgtgaacacacctgtctttacttaaaaaatcttgatgttttattcatcatggagtctttaaaaaaaaacaaaaaccgagtctcgctctgttgttcaggctggagggcagtggtgcgatcacagcctactgcagcctcgacctcatggactcaagccatcctcccacctcagcctcccaaaatgccaggaccacaggcatgcgtcaacatgctcagctaatttttttttttttttttttttaagagacagagtctccctgtgttgaccaggctggtcttgaactcctaagctcaagtgattcttctaccttggcctcccaaagtgctgggatgacagatgtgagccactgcacttggcatcatggagtcttgatttgtagacattgcattaaaacttattttggtaagggctgggtgtggtggctcacgcctgtcatcccagtgctttgggaggccaaggcgggcggatcacaaggtcaggagttcgagaccagcctgaccaacgtggtgaaaccccgtctctactaaaaaaaaaaaaaaaaatacaaaaattagctgggcgtggtggcacgtgcccgtaatcccagctactcaggaggctaaggcaggagactcgcttgaacccaggaggtggaggttgcagtgagccaagatcacgccactgcactccagcctgggtgacagagtgagactccatcttaaagaaaagaaaaaaaaaaacaaacttattttgattacattaaaatgtatctttgtttgtttgtttgtgttttcagacaaggtcttgctctgttgcccaggctggagtgcaatggcaggatgatggctcactgaagccttgtcctcccgggctctagtgaacctccggcctcagcctctggagtacctggaaccacaggctcgagccaccatgcctggctaatttattttaattttttttgtagagatggggtctcactgtgttgcccaggctagtcttgaattcctgggctcaagtgatcctcccacctcggcctccaaaagtgctgagatttcaggcatgagccaccactcctggcctaaaatttatcttgattcatgagttttttggctcccccttacattttacacccctggcaagtgcctcactggcctctccctagtcccagccctgtcacaaggccatggagatacagtcacaaacacaactgagaacacagacagtcatgagacatgtgctggttaccaacccccaggccaagcaaacacacttccagcaaacacacatgacttgttggtgacagctgagaggacacatgcctggggagagagaggactgtgtgtgaggtggtgaggcatgcatggggcctgccaagttggggagggagtctgggccaagccacggtcccatatagggtggtgaataaggtgtagagtagaggtgcagcaggaccaacccttcccaccccaccccttcgacagggacctgagggagctcagggagggagagaagccagaagaccaggcagagactgaagagagctggcaaggcctggctagaaaaactccaggcaaggcctgtgtaagttggggctcccaggctgtccagcagggggccctggcacccagcaacctctgcttgggaggtggctacagaggggtgtgggtgttggctaggggcccagcaggatggatgccagacggacttctctccaacaataacagccctggctgttgccatccaccgagctggcagggccccagtttgggtggggagaggaaccagcctttcccagtctggcctgagaccctcaccacttccctccagttttcttccacctccagccccctctgtacacaactgcagccactggccaccagccttgccatgcctggcagatcttctgaccactagccctgccacccccacagacccagagaccaggaaaggagggtggggagcgaggaagggggccaaggcagagggcagaggagggctaggagaggaagagagagagactggacaaacatgagggcaggaattagggggttgtggacagacatgaagccactctcaagtcatggggctgtgcctggaaaaataccacctaaacccatcttcctgccctctggttagggctggcggggatgtgggggatgggggtggggtgggggagggttgggaaggaatatgtgtgtcatctctgtggggcatggaaacagaaggctggggacacccattctggagtagcttggggagagccactgaccctaattagaaaagccacctctctccttagggccctgtctgtttctctggggacagggtaggactaccttatccctatgatgtgaggtactgccagttgttaatcagtgtctgtggcttctctaggggacaagcccttcgggtcagtgggcatggggtgggcagcgtgggttggattttctcctcaggacctttccagccttaggatcatcctctagcactgagtactgctggaagggcagggagtgccccccaccccaccccatttattgcccgaccaaagagagggcctccctccccctcccttggagggacttgctggaccacccctcagcacgcccacaccttcctccttagctagtgaaagacatactcagcaaggcttccgcctgtcaggatggctgggacaataggattcactgaggatataaggctgttcctagctttttctcttcccattcccacctgtgcctcagttttccaaagtgctggatttagaaagggtgaattatgagggagctggagggctttgccccacccccctccgcgcgcacacgcaagcacaggcagaggcacataccccctccaagtcaaagttgtgagtggggtggtgtttgcgcgtctgtggctgggactggatgtgtcagggatgggaaaacccatcatgctggtcacagaaaatgcgcggtggggacagaagcagttttgaaggaaaagaagaggagggggactgaaagaaagaagggggcgctgaaagggagggcgctgggaggaaaaaggtgcagtgtggaggaagcgcggcgtgggcagggcttgggaagggataacggaatatctgaggtggagtgggccgtggagcgtcggggccggtctgagcagcgggtgtgtaaatggaacagtcccgagatgaattttatgggagtctgcgcaggtccttaatgtgtggctgtaccctccagccccatgtaccccacacgatggacagacagccttggtgtggcagggcccaaagaggtcctatctaccgcaataacacgaccaggcggccctgggggcgcaggggctcggggtgggagcggcggagcgcgcggagtcgccgcggggtggcaggggtgggccgggggcggggccgcgggcgtcggggaggtggcagtgggcgcagggcggggcgagctcagcggagggcgggtttgaatgtgccccggcgggagagggaagctgcagcgagagcgcgcggatctcagcgcgggagcagtgcttctgcggcaggtgctgcccggggccggggactggggactggggactgccggggcggaagacgccgctgcccgcctgccacggagggcagggagggcgggcctgacggctccgcagcccggagaagggacgccgggtggggccccagtgcggagcgtgcggagccgcgcagcacgtggcgcgcacgggccagggagcctgaggaccctgcggggaccgggacccaagctgggcggggcggcctggctcccgggcctaaaacaggctgcggtcacgttgacctccgcaaggggcaggcgagtggacgggtgatccccatcgatctggtcggtatcagggaggggccgtgccgctgactgcgctggcggaggggtatggggatggggatggggatggaggctcgcgagcggaggtgcggggctgtctctttaaccccggtcttttactggctaaactcgtatccctggcgtctccttcctgcgcacgtcttcatttactgatttactgtgagggtatatgagagggtgaagacacacagtcctcggctttgcttaccaggagagagcagtcgtaggtcaaggctggctccaaccctgccctcacacctctaggggtctctctgcagccctgtggtagtccctttgcctactcctctcggtggcctccagaccctccaactttcctcctgcttgtgtaagctccccatgccaggatgtgtgtgatggggcggggctgagctgcctgacactcaagtcaggctgggaatgatcttggtctccacctcatttttccctttagttgaatcagagttccccccacctcccagtctacagggctaactgagaagcagcttttatacctctctccattccaaaaggagcttgaacatttaatatggattctagctcctccactcaccagctctgtgacttcaggcaagtgactcaacccctctgaacctcagctggccccatctattcagtgctagtactagcttatgggtggttgtgaagaaaagacaagagatctgcaggtagtggctagccccatatgaaatcctgggagtggagaattgcaggagaggtgttgggagtctggaggcagggaggtactcaatttggtggctactttcaggggcccacctcagcaggccaaggcatagttggagggacaccagatgctctgagctggtatcagatccctgtttgccgctgggcaaaggcagacaaaagcaaaacacgaaggctggccagctgaatgttaggatatgggcaggaggagagggctggagttgaattgtgcccaagactggtatgggaactcctgagaacagagagagcaggggtgtagcagggggccagggaagaaataaatacttcttctctaagcctaagccagttttacccaggagaacaggagctattctccccaccctaggcccccatctgctttgaagctacacctgctcttaactgccaggaatcttgcctgtggggtggagtacggggtatgcgggtatgaagtaagaacctagaggaagagtccctactacctaatagaaaacctgagacctaggcagggctcagtggctcatgcctgtaatcccagcactttgggaagccaaggtgggtgggtcacctgaggtcgggagttcgaaaccagcctggtcaacatggtgaaaccctgtctctactaaaaatacagaaatcagccgggggtggtggcaggagcctgtattcccagcttcttgggaggctgaggcaggagaatcacttgaacctgggaggcagaatttgcagtgagccgagatcatgccattgcactccagcctgggcaacaggagcaaaaactccgtctcaaaaaaaaaaaaaaaaagaaaaaatctgagacctgaggctttcccccacccccactccagtaatgccctcttgccttcatctctctagaaaatgtaaatatgattattcacccctcgtgcctaggacagtgcctggctagcatgcacaggtcctcagtaaatatttgtcgaaggcctgaatggaggaatccttctgcctctatctggaggtgtggggctgaggggctgaggaggacctctgagagcttggagtttccctggggagggttgagaggaactacagggaggtgggagagcccgtggaaggtctcatggtgcccagctgcttctgtttgtctgagtggggccagaagcaatgctgcacctgcgagagctcccctgctgagactccctgttctcttatctcccgagcgacaggggtggctttttatctcctgggtgtgcttctgcttctttgcttgcaaggcttctcagaatggggccccatgaagcctgagggactctctcctgataacaccctgtgccacctttttcattctggatccgcacccaggagcccgtggacaaggcccactgcctgagcctgaactaggagcacctcctagggactgcccaggcttgctctgctctgacccttctgctggccagtctgggcacctggtgagtgcccagaaagggagggaagggaagctgtcctttcaccccaaacagcaaggcctgggcccagctaggcctgagtgtggggaatgtgtcagtgcacatctgcctggcttcccatgccacccaatgggaaagctgtttaatctgctggtgccagggggtctccccctacacaaatggggagcaggagagggacgctgaggcagaaggataggtgctttgggatccacccctccaatcttcttttcaaggtcactcttagaaaggggaagcggacaggagcctgtgacagagaggaactaagggaggactaggtgaccctggggtcgggaggggggagggggaagggctgtgcccccacatccattatgaaatattttcttggaaaaccggccagcaactaggaagcccctgggcagtggctggaaagaaaggttaaggtgccaacagcagagagactggaatctgggttgccttcaggagaggacagccccactctagccatgaatccaggggctccccagggagggtggagagaccagacttgcagagaggggcctggggagcctctggtttgacctcagtcatcatcgatgttgtcgcagctgctgcagatctgcctgttccgtgtccttcctcctcctcccccgacctctttgctgtgtctcctccatttgtctccctccttcccttgtcatcactgtccctgacccctctcgtcctcttgcctgccttctttgactgtctttccctccctcccatcatctttcctcctccttccctcctgctctccaccctcctgtttcccagcttataaactgcttcggctgctggataaaaatagcggtggcagcggccaggccgggagccaggtagagtctgagcaggcaggggggccgcgcaggactggcctgctgggccagggggctgggtgggggtcaagttgagtcgtcctgaggggcagggtgcagagggggtcttactggactcctccactggcctgttctgtcagccctgccccctctccccctaagagcctgaggaggcctatggcagggccaagacagggcctcacactgttcctgcccccagcaggcccctgagggagggagctgtcagccagggaaaaccgagaacaccatcaccatgacaaccagtcaccagcctcaggacaggtaaggggtaaggggctgggctgtggatccagggaatgggttttcagggagctgggtgtggtgtcctttggaattgggggttgccattgctggctggccttccagccaggtagctatgagtcaggtctgcatcaggggtggggaccccgtgtgccttggctgggtgctggctggggtgtctgcgggaagggcagggtgcgtgggcagcagtccttccctggcctgtctgtgtttccactgttgctctccagccagttagcggctttcggctcctcccgccaccactgtggggagatacttggctgcacccctccttccaatgcacatctggcagaactgccctggggcctctgccttagatgacctggcccaccctggttcttgatctgatcttcctctcaattccctgcctctggagcctgtgaactcccagtcaagttagacttgcagttatgactgtgaatatgtattttggaagaagaggctgtagcttaattcaatttctcaaagggatctgggacccaagaaggctgaggaagtgatccctgagatccaaagctccttcaaagcgtcaggctctgtcctgccctccaactcaggccccagaaacccatcacgtctgccctacccaccccatctccctcctgtgccaaaggctatgaaactaggccacttttgcctgtgggggctttgagcatgtagcttaatctctctgggactgtttttccacctgtaaaataagctaaaagtatctacttcccaggaagtggatctagaagtaagggaatttaaggaggcatggcaataagtccaggccccaggttgcttccctgcctcctgtgctccattcccaggctgcctgcccattctgtccccacctccgctctcctgtgggcagttccctgaaggcctcgccggctccatttgccttattgcacagctcagtcatttcccagcgtactccccccaaccccgatcctctgtcctatgtgactttgggagtttttccttctgctctgggcctccgaaccaagcctttagcttctccaagggaagcatgtatgtgagggggttgggggggctgcagttgcattaactcggacctgctcacgtggtgtgctcaccacgccatccctgtatgaggcctgccagcggtccaggctcctgcactctggccaggcctgtcttctcactgccttgggctttatccctgccatctctgaagagagctggtgttggctctggggagggtgtgcaaacccaactggagatctacatgggccgggctggggttactcagctttcaggcaaggcctatctgggagaagctggcgtgacccggaagggccttgaggtatagggcttggggcattgccctggccaaaggtggacagtccttatttacaccctgaggcccagatggcctccagtggccccatacctcctggcctgccctgggtggtatgaactacaaagttctatttggccaggaagaaaatggctctaaggccctctcttcacagcggccctgaggcaccctgcccacctgccctgtaggtccagaatagtatgggagtttcttaacttcagaatcctctctggggagtaacacagtccctgaccagacagcataattacttccagcctgcctggtgggagtggaagacacttgctgcttgctttctcactcatccacccaccccctgcccttcggcaggatttccaaaaccatctccggatgtgtgggtcacactggttcccagcctgcagagtcccccgagccttccagggctgataaccatggtcctgtcagccatgccattcagtcctatgaccctgaccccatccccaccccaaattccaacgagcaatgtacccttttctccccccacacccataagaggacacatgcaaacggacacaaacacagacgccctgtgccctgggacctagagagactgacaacggacaggggctttcctggggctcattgtggagtggggcaggatggtgcgtcatttggcccatctttcctcctccattgcagatacaaagctgtctggcttatcttcttcatgctgggtctgggaacgctgctcccgtggaattttttcatgacggccactcaggtgaggctggagggactgggctccatggggcagtgcccactgtgcttgcaggatctgactctgtgctggtaggcacagggaaagagatttcaacactcctctctgcaacccctgcagtatttcacaaaccgcctggacatgtcccagaatgtgtccttggtcactgctgaactgagcaaggacgcccaggcgtcagccgcccctgcagcacccttgcctgagcggaactctctcagtgccatcttcaacaatgtcatgaccctatgtgccatgctgcccctgctgttattcacctacctcaactccttcctgcatcagaggtgagtgcccaccccctccccagcccccagcctgaccctcactgtgtcctgcacccccttggctgagccccagctttgcccacttgtctctgccacccttggcctctcccggcaggatcccccagtccgtacggatcctgggcagcctggtggccatcctgctggtgtttctgatcactgccatcctggtgaaggtgcagctggatgctctgcccttctttgtcatcaccatgatcaagatcgtgctcattaattgtaagctgggccaggagggggcctatgggaggaggcatgcccaactacccccactcttttttcagacccagcgttagccagagagaagcccagcctccgcctggagggagtggatgctgtgagcagctgggattcagaggcctgagtgggcctggaccagggctgggagggggcagagagaagggcagctcagcctcaaggctcaccaagagtaaagtaggaatgacagggatctgtcttcttgggcacccccaaccaccagccctagctcccctgctcatgcccgccctgtttccccagcatttggtgccatcctgcagggcagcctgtttggtctggctggccttctgcctgccagctacacggcccccatcatgagtggccagggcctagcaggcttctttgcctccgtggccatgatctgcgctattgccagtaagtccggctatctacctgcccagtgccctggtgtggtggggagaggggatggggcctgtctctgatcactgacaccaccccaggtggctcggagctatcagaaagtgccttcggctactttatcacagcctgtgctgttatcattttgaccatcatctgttacctgggcctgccccgcctggtgagtaaatggagggagctggggtttggggtataggggtctggggttccagaccacgggtgttctgaggacaaaacctgaaggaggccgggattctggagattctgcctctaaatccacctcccccgtctcccttacttgataggaattctaccgctactaccagcagctcaagcttgaaggacccggggagcaggagaccaagttggacctcattagcaaaggtccgaagagcctgaggaagctggggtggaggatggtataccaggcgggggatagcatgagcaaagagaacaaagatgagtgccctgtgttagctagcagccctgagccagaggaggactgaaggactacagcagggagagggggacaataggaaataagggccggcaatgataaaatgggggcagatcctggatgaccttgaatgcctgaggtgtttggactaaaggcagtgggaagcaatttcagattcttgagtgaggagtaacatgacctgaggctcctgggagaggccaggcccccgggtcttgagttgtagggatttggaggcgaggtctgggttagggttagagtacggctgggactggttaaggaggcgtctactttcaagtaatcccagccgttttggggaatgtttatgttgtcttctgttgctctgtcttccccacaacttggagatttcttccatcccgcaggagaggagccaagagcaggcaaagaggaatctggagtttcagtctccaactctcagcccaccaatgaaagccactctatcaaagccatcctgaaaaatgtacgtaggggaggttatcctatcttctaccccttgtcctctttctctcctccttttgctccctccccctgccacccatctcctccctttctgacctgagagtggtcactcctggattcttttgtgtgtgcgtgcgtgcccatgcgtgcgtgccgggggtggggattcgtggttccttttttttgagacagagtttcacacttgttgcccaggctggagtgcaatggtgcaatctccactcgctgcaacctccatctcctgggttcaagtgattctcctgcctcagcctcccaagtagctgagattacaggcatatgccaccatgcccggctaattttttgtatttagtagagatggggtttcaccaggtcaagctggtctcaaactcctgacctcaggtgatccacccacctcggcctcccaaagtgctgagattacaggcgtgagccaccacgcctggcctggattcgtggttctttaatgcacagccaccatgaagacacaggcatttgggtgactctaccccttctatctagatctcagtcctggctttctctgtctgcttcatcttcactatcaccattgggatgtttccagccgtgactgttgaggtcaagtccagcatcgcaggcagcagcacctggggtgaggatgccacaggtttccaggatgggaacagacaggatcttgagttgggctggaagtggggaagggagggagcctgggtcaccttctccccgtttcctgggtccatttgcccttccctgggctggaagcatcttctccattttactgttggggaagctgaggcccagtgaaggttaggcttgctatacctgcctctgtgagcctgataaccacccgttcatctcctcttccagaacgttacttcattcctgtgtcctgtttcttgactttcaatatctttgactggttgggccggagcctcacagctgtattcatgtgggtaagtggaggaagagggccccaggcccctgtgggaagtaagagtccagcctggacccagagagggaacccaagaaagtatggtagtaaggggaccatttgttttaaagtcgaggcataatttatgtatagttaagtacaagtcttaagtgtacaacttaatgaatatatgtatatacacatacctgcccagatcgagatgtagaatatttccagcactccagaaggctccaccatgcccctttcaagagtaaccccctaaggagaaccaggctttgaggtttcagttcagatcctgaggggccccagatggatccttgggggcctggctgtgccctggggtggcggcctgggctgaggccctgcctggtgcccacagcctgggaaggacagccgctggctgccaagcctggtgctggcccggctggtgtttgtgccactgctgctgctgtgcaacattaagccccgccgctacctgactgtggtcttcgagcacgatgcctggttcatcttcttcatggctgcctttgccttctccaacggctacctcgccagcctctgcatgtgcttcgggcccaagtgagtagggctggcagggaacttggtggcatcagacaggatctagagttccagtgggggacactcagtagagggagggcaaaaggagagtccctgctcccagagctgagaggagagatggctcaggaggggctcccaggctgaggggatagtgactgtagtggaggggggcgccaagcttacttgggtggaggtggagacaggtttgcaggaaggagtgaaagacaaccccaccatacacgttccctcaaggaggagaagccaggttggggttaggcagccaggatgggttgatcaacagaatgaggttcgacagtcaagttgctccaccccacccctccttccacccagaggctctgggctggggtacagccattctgaggtagccttgcccttccttccccgcttaggaaagtgaagccagctgaggcagagaccgcaggagccatcatggccttcttcctgtgtctgggtctggcactgggggctgttttctccttcctgttccgggcaattgtgtgacaaaggatggacagaaggactgcctgcctccctccctgtctgcctcctgccccttccttctgccaggggtgatcctgagtggtctggcggttttttcttctaactgacttctgctttccacggcgtgtgctgggcccggatctccaggccctggggagggagcctctggacggacagtggggacattgtgggtttggggctcagagtcgagggacggggtgtagcctcggcatttgcttgagtttctccactcttggctctgactgatccctgcttgtgcaggccagtggaggctcttgggcttggagaacacgtgtgtctctgtgtatgtgtctgtgtgtctgcgtccgtgtctgtcagactgtctgcctgtcctggggtggctaggagctgggtctgaccgttgtatggtttgacctgatatactccattctcccctgcgcctcctcctctgtgttctctccatgtccccctcccaactccccatgcccagttcttacccatcatgcaccctgtacagttgccacgttactgccttttttaaaaatatatttgacagaaaccaggtgccttcagaggctctctgatttaaataaacctttcttgtttttttctccatggctccctgtgtcctccagccgtggcttcatgccctggagtgggtagagggctggcagcctgagtctgggagatgagcatgacccagctgggccctggccaggactggacctgggtccaagggggaggaggggggagtagtcctcttggcctcagaggggctgcaatgccccctgctggggccacaggggagggacaggcctggaaccagaacaccaagactgttagccaagactaagaacgggtttttctttgctgcttcattctttctttcataggacagaggatggagatagctccccatctttcctttgtcttcactgccagcccctccactctgtccccagccccagcaatgaactctgcaaaactggccagctcctggccatactcccataccaccaggcaggaagaggccgaggcctgagggttctcccctacctggcacccagccttaacaccaaagctcagcctgccagacttcctggggaacaagggccctgtgtgtctgcacagtgaaaccaacccttcccttctcaacacaaactctggcctagggaggggtgggttgttatggaactatgagtgtctcagtggagaaggccctaccactgggacccccatctcaagaatgacctgactggaagtgagaccagagctctggccacagtgcagcacccctgcaatctgcattccttaccctcccacaagtctcagactcctcccagaaagcagaagacattcctgaattctcagcgcaggctgctcactcagccctggccagcagatggctacagagttggcacctttgtcagcgcttcctttctcactggagtttaatttaattgagaacttcaggcctcattaagggctgttagcgcatttttaaggctctttgatgagctctgaagccctaatggggtagctaagtataccagggcactgggaactgaagttcatgtgctattaatcatttgtcagaccagagtatttatctgcggtgctggaaaacaaggtattccttttgg

SEQ ID NO: 109 - DNA, 3274 bp, Homo sapiens
cggagctctgggcgggcgctggggtcgcctgttgcagcctctcttccgcccggcggcccacaccggtcaggcccggcgcgggctgcgctctccagctgtggctatggccccagccccgagatgaggagggagagaactaggggcccgcaggcctgggaatttccgtcccccaccaagtccggatgctcactccaaagtctcagcaggcccctgagggagggagctgtcagccagggaaaaccgagaacaccatcaccatgacaaccagtcaccagcctcaggacagatacaaagctgtctggcttatcttcttcatgctgggtctgggaacgctgctcccgtggaattttttcatgacggccactcagtatttcacaaaccgcctggacatgtcccagaatgtgtccttggtcactgctgaactgagcaaggacgcccaggcgtcagccgcccctgcagcacccttgcctgagcggaactctctcagtgccatcttcaacaatgtcatgaccctatgtgccatgctgcccctgctgttattcacctacctcaactccttcctgcatcagaggatcccccagtccgtacggatcctgggcagcctggtggccatcctgctggtgtttctgatcactgccatcctggtgaaggtgcagctggatgctctgcccttctttgtcatcaccatgatcaagatcgtgctcattaattcatttggtgccatcctgcagggcagcctgtttggtctggctggccttctgcctgccagctacacggcccccatcatgagtggccagggcctagcaggcttctttgcctccgtggccatgatctgcgctattgccagtggctcggagctatcagaaagtgccttcggctactttatcacagcctgtgctgttatcattttgaccatcatctgttacctgggcctgccccgcctggaattctaccgctactaccagcagctcaagcttgaaggacccggggagcaggagaccaagttggacctcattagcaaaggagaggagccaagagcaggcaaagaggaatctggagtttcagtctccaactctcagcccaccaatgaaagccactctatcaaagccatcctgaaaaatatctcagtcctggctttctctgtctgcttcatcttcactatcaccattgggatgtttccagccgtgactgttgaggtcaagtccagcatcgcaggcagcagcacctgggaacgttacttcattcctgtgtcctgtttcttgactttcaatatctttgactggttgggccggagcctcacagctgtattcatgtggcctgggaaggacagccgctggctgccaagcctggtgctggcccggctggtgtttgtgccactgctgctgctgtgcaacattaagccccgccgctacctgactgtggtcttcgagcacgatgcctggttcatcttcttcatggctgcctttgccttctccaacggctacctcgccagcctctgcatgtgcttcgggcccaagaaagtgaagccagctgaggcagagaccgcaggagccatcatggccttcttcctgtgtctgggtctggcactgggggctgttttctccttcctgttccgggcaattgtgtgacaaaggatggacagaaggactgcctgcctccctccctgtctgcctcctgccccttccttctgccaggggtgatcctgagtggtctggcggttttttcttctaactgacttctgctttccacggcgtgtgctgggcccggatctccaggccctggggagggagcctctggacggacagtggggacattgtgggtttggggctcagagtcgagggacggggtgtagcctcggcatttgcttgagtttctccactcttggctctgactgatccctgcttgtgcaggccagtggaggctcttgggcttggagaacacgtgtgtctctgtgtatgtgtctgtgtgtctgcgtccgtgtctgtcagactgtctgcctgtcctggggtggctaggagctgggtctgaccgttgtatggtttgacctgatatactccattctcccctgcgcctcctcctctgtgttctctccatgtccccctcccaactccccatgcccagttcttacccatcatgcaccctgtacagttgccacgttactgccttttttaaaaatatatttgacagaaaccaggtgccttcagaggctctctgatttaaataaacctttcttgtttttttctccatggctccctgtgtcctccagccgtggcttcatgccctggagtgggtagagggctggcagcctgagtctgggagatgagcatgacccagctgggccctggccaggactggacctgggtccaagggggaggaggggggagtagtcctcttggcctcagaggggctgcaatgccccctgctggggccacaggggagggacaggcctggaaccagaacaccaagactgttagccaagactaagaacgggtttttctttgctgcttcattctttctttcataggacagaggatggagatagctccccatctttcctttgtcttcactgccagcccctccactctgtccccagccccagcaatgaactctgcaaaactggccagctcctggccatactcccataccaccaggcaggaagaggccgaggcctgagggttctcccctacctggcacccagccttaacaccaaagctcagcctgccagacttcctggggaacaagggccctgtgtgtctgcacagtgaaaccaacccttcccttctcaacacaaactctggcctagggaggggtgggttgttatggaactatgagtgtctcagtggagaaggccctaccactgggacccccatctcaagaatgacctgactggaagtgagaccagagctctggccacagtgcagcacccctgcaatctgcattccttaccctcccacaagtctcagactcctcccagaaagcagaagacattcctgaattctcagcgcaggctgctcactcagccctggccagcagatggctacagagttggcacctttgtcagcgcttcctttctcactggagtttaatttaattgagaacttcaggcctcattaagggctgttagcgcatttttaaggctctttgatgagctctgaagccctaatggggtagctaagtataccagggcactgggaactgaagttcatgtgctattaatcatttgtcagaccagagtatttatctgcggtgctggaaaacaaggtattccttttgg

SEQ ID NO: 110 - protein, 481 aa, Homo sapiens
MLTPKSQQAPEGGSCQPGKTENTITMTTSHQPQDRYKAVWLIFFMLGLGTLLPWNFFMTATQYFTNRLDMSQNVSLVTAELSKDAQASAAPAAPLPERNSLSAIFNNVMTLCAMLPLLLFTYLNSFLHQRIPQSVRILGSLVAILLVFLITAILVKVQLDALPFFVITMIKIVLINSFGAILQGSLFGLAGLLPASYTAPIMSGQGLAGFFASVAMICAIASGSELSESAFGYFITACAVIILTIICYLGLPRLEFYRYYQQLKLEGPGEQETKLDLISKGEEPRAGKEESGVSVSNSQPTNESHSIKAILKNISVLAFSVCFIFTITIGMFPAVTVEVKSSIAGSSTWERYFIPVSCFLTFNIFDWLGRSLTAVFMWPGKDSRWLPSLVLARLVFVPLLLLCNIKPRRYLTVVFEHDAWFIFFMAAFAFSNGYLASLCMCFGPKKVKPAEAETAGAIMAFFLCLGLALGAVFSFLFRAIV

SEQ ID NO: 111 - DNA, 51157 bp, Mus musculus
  misc_feature (1)...(51157): n = A,T,C or G
agcaagccagtaagcagcacccctccgtggcattggctcctgcccagggtgagtccctgccctcgctgcttttgatgatgatctgttttgtggaactgcgagtgaaataacgtcttccttcccaggttgcttttggtcatggtgtttcatcagagcaacagtgaccctaactatgatagatgtatatttagtatctgtgcctctgggtgtgttaagctgtgcttggaacatacttatatggtttttgtaatatgacttaaaaatgtaacttaagtcaatcatcttccatgattattgtgcatagtgttctttttgtaaagtcctttattctgagtgtggacgtatctcctccacacctgctggggctgcagcactggggaggaggggtgggtcttaccctgtgaagctttcctgccttttgggaagcaccagccagtaaacaagaagtacatgtccagatatcgatgagtgccctaaggacaggaagctgggcacggtgtcgtggggcaaggacagtgggtgccagggctcctgggagctcagtagcggatacttctttccctgggggatgggagaggacatgctgagcaagagagttctatctcaaagcctagatgacacacaggacctatggagaagtccatggaaggatgctcctgaggggtccagacctgaacagaaggagcagaagggccgtgtgactgctggaaggagagcgggatgtcggaaggggaacagagtcatgggagggagagagagtagagcgtgtttataagaattggccccagttttaaatccacagtgacagggtccgatggatatttttggatggtgactgcctgctctgtgcagagtgtgtgggaagtgaggatggagacgagacgggaggaccttgtcgctgatcgatagtcatgcaggcaagaggctggcgtgaagggactgggttagcagcgagcacagtgggcagggtctggtttcagagctgaggaagctgtagctgccagacatgcagaggaggtgcaggaaggggtgaatcgagaacggccccggagctttggcttgctttgccttggggggaattgagacaggatccttgtggcttagttggttgaactgtgttcattaagatgatcctctcgttttggcctccccaatgctgagatcacaggcacgaagcaccatgcctggcctatggctttggggagccgtgtccgtaccgttttttgatagggagaacattaaggaagaataagttgtgtgtgtgtggggtgctctgtgaatcaacaatctgctttgtgtgtgagctgaaaatgtccgagacttgcaagaaacaaattgtgcttctatcaggagacaaaactgttgggagctatatagaacatccggggaaaagccagaatcaacttaaactgaatgtaggttttacttaaattagcatacgttcttaagaaaattttaagagtgcagcaagagatgggccagaatgcttatggaggtaggaccggccgcgggcctccaagtgacagacactctggtcttcagtgaacattttctttacagtcttgcctaatgtctcttgtagaacagtttgttgtggttggttttggttttgtttgtttgttttgttttgttttgttttgagacaaggtctgtctacatagtcctggatatcctagaactcgatatgtagaccagatcggcctcctcatactcagagattctcctgcctctctctgcctttttactgctgggactaaaggcatgtgccaccacgcctggtactgactgatcagatagtgaatgctcaataaactatcagattggtctgtcattgtcaccaccaccaccaccatcaatatcaacatcatcatcactatcaccaccaccaccatcatcaccaccattatcatcaccatcatcatcaagtaaaatgacattataacatgactcagaccttggagtcagaatcctgggtcccatttctggctttgttctttacaggtcacgagactctggcaaagtcacttaacccctttgtttcctctttgagtaccacgtgaaagacaccagcccccaccttccccctaagcactgtgatggtgccagagacagtcatacagtcagtcgctcagtggctgcttacctctttctcacgaactttgtctaaaccatcatgggacagcatctcacaccacactcaccgttcactatccatcgaagtctctgcatttgaatctgtgtgtcttgactgctgttgaacatggggttcaggggtgcagctggcaggaaatagcagagaacttgtgccatgtgcagattgggacttcttcaaggccagggagggccgtggatgatttcagcataatatgactgacttcctgcgctgggggacattgactgggatcattggagtaagtgagggctgagagggactctggacgtttgtcttatttccccagtaccactgtggccctgaagaagagggtgattatgatgtccttaaaaggtgccccgtgtgctcattttaccatggcctttatagagagcttcttgagggtggagcatttggtgcgtgattggagatccttggagcttgcttacccatagtcccatagacccttagatgggtcctgtaggtagggagtagctggaccctgcgcagactggaggagaacacttaagagtaagtaaggtttttgttgaactagaatttgtaaaatttgagtaatcattttgtgtattttatctgttgctttttttttttttaagactaaaaataaaccttccaatttccatacccctggagggcagagttgcaaacacgattgttacttcagcagccattttcttcttcacggttgtttcccacatactgctactaagttttatttttctccacaacctgtatctgttcttcccactgttgccattttcactgagtccctgaaatgcccagtgttacacttgtttccttgaattcactgtctggtacttttttttttcttccacacatttaatgcctgggattcccttatccggcacattcatgaaaaatgtcacacagacaactgtcacagttgtcctctatcacctttgtcctcattgccatcatcatatagcatcctgagtaagcttgtcagctggtaaaaggagcctttagcactattatgtaagtgtgatcatctggttgtcgagcatccttgggacattagagaggacccctttcgacctaagatgtggtccatcttttcctgccccttgctctcccagtccaacagttttatcaggtcagggttgccgctggctgcactgatccaacctcccttccagatacctttctcaatactttcctgatccaggatcaacgccaggcttatcgatctctgggggtgtagatcacagccgtgcagatgcttaacccgtatcctcacctaggaagcagacctctgggtgtgtgcatgagggtgtttccagagaggtggtttacgtgatggggcggggaacccaccctgaagccgggtaacctcacgcctcagggtcgtcaagtaggactgaaggagcaggcagtagtatagcaggaacttcggcttcatgttaattagcgacaggaagtcactgctgcagccagccgtgctttgcccacctggctggcctgatccttaaaatgggcagagtaaaccctctcttaagctgcttcttgccagctgctgtcacaaacacctaatacagcctgcttctcgacaaagaagactctgagatatttctgccaaatgccagttatttccaaacatttttttcctgttccattcgttctgtcctcttcctctgcccccttccttcctgtcaattccttttgaaaagcatttgttgtagtctgaactgatacctagggtttgtatttctgaaatttaagggggtgggggtggggaaagcagggttcttttaacgtaaaagcttcagattataactctaaaaaaatataccactagggcacatttaggttattatgtgtgcattgaaatgcagatattagaacaatttgtattttgagacatgggtttggtttgtatgttttgtgagttttttgtttgtctgtttttttgttttgttttgttttgttttgtttttttcagttttaaggcaggcttcttagttggctccctaagaagtcttttggcctggaaatgtgttttgtttggcttgaatgctgttgtggtatttcccccaccccctaaattagctgctagcatttgaaaatgagatttcacatgtttttcgttttatttttgtttttaaaagatagcaagcccttctgagtctaagagggaaggcctggctagacctgcagtacgtgctggttaaggtgcctgctctgcaggtagcagcgctctctctttctttctgagtctgtgtaaaacaagacagtagctcagttggaagacccgtggctatgggatgccgtgtctatttcctgtataaaacagacagaggctctggctgctagctgctggccaccccactgtccttggcaagcctcaactactttgtctggctggcttttggagtgtgtttgggtttgcacctgctcacttaaagaactcagctaatcaaaagtctacttaagagttggaagcaggacaggaagatggcagttattttccattcggccccctccctgcagactgtcagagcgggatacgacgatcacatgccccgcccgtagaagcaggtgacgcttgctagtatggcattcacctgacaggatggaaggagagaaaggcccacagctgctggttgcttgaggtatcctgaaagtacaatggccgtagggttgtgctcgtctcagttagtttgatgacatggaagtaaggactgccctgagtccgagtcgggtcagttgagagctaaagcctaacattccagctgtttgctgtggtcctgttcagctgtgaccatgttagtgccagaaggggtgttagagccctggacgcctgaggtctcgggggtcttctgttgtggattcacagttaaatgtattgctccagagctgagattggtaaatggtgctaaattcaggttcccagctctgcttcttagatgtgtgaccccctctgtgcctcagtgacttactggaaagagagggatagcgacactggcttcatagagttggcacgaggattcaacccaactgcacacatggtgcatgctgtctgaaaacgggagttgcttattgcctggcagagtcagccagaatccgaatttgaagtgcatcaagtgattgcataattatcgtttttttttccctccctcagtttcagcaggcctttaggagtgggtttaatctgtgtatttgaaaaagaaactaacagcaatttgagccaagttgctggtttatctctagatatatgtgtttaccttactcttggggatataaaggaagagtgggtgggtgggggacagacaagaaagacattgtaactcctcattaagaacttggtttgaatgagttaggcacaattgtcaagtaagtcctgagtatacagtgctcctaaaagatactgttcggttcaaagactttaaaaagcaataggaaataaagtagaaagagggggtatattatctccctattttgtgataaacatggaaaacacaaattaaagtacaggtaatgtcttgcttgagaatgagcatcagcctcagactgaagaagtatcaatacccttagtaaggagagggtgggaagatggggagtggctgcttcgtaaagccccgaatctcacggggaagattccttgcttcgtacggatgtgaaatgaattaatggcttaagctacccatgccagaagtgatgagggccgtagcaaaggagatagggatgggaagaacacgggggtgattggtggtcagttgggaaggatgaagacatgaatgggtgtcttgagtaatctggaattggcccgggcctgagagaacatgcctagaggggaaagtgaatttccttgtgtttccttttgggttttttgaggactctgaggcatccaagtatacatgcagcatccaagagttttccacatgggttcgggaacctcctggagtggttctgtgtgggtaagcacacactcatctggtaaatgattagtctgaagctggccaggggccaattccgtgaagcaaatttggaagtcattcgtgctgagtggtggttgaagccacgagggaggataacattcatggagggggaaaaaaaggatgagatgagccagccatcaccaagctcaggagtgcttccaattatttaatgcacgcgcctggcatggctggtaactcgtggggctgagtcgaaggattctagccatatactaaaaggaatcttatctgtatgtgaaagattctggcagaatgtaaaaggacacagaagccctgaaattggcaagatagacgtcagtgttagcatgtcagttatgcatgtatgataattctccatcggaaagaaggagataacgcccagctgctgaaaaacaaacaaaatccagattgaatgattttaaagaaaacattgcaaattaccaaaaaaacatttgaagtatttttattgtaaatcaaggaattggtaccttcacaacccacgagttaatgatgagatttggaaagacatcatccttagtgttggtgggagaacagaaacatccatctgtttcctatctattaactatctataatccaaaagtcagagaactgcagcttcaaacttgggaacttgaaatgccaccatgcttcctgtcttagtcagggtttctattcctgcataaacatcatgaccaagaagcaggttggggaggaaagggtttattcagcttacacttccatactgctgttcatcaccaaggaagtcaggactggaactcaggcaggtcaggaagcaggagctgatgcagaggccatggagggatgttctttactggcttgcttcccctggcttgctcagcttgctctcttatcgaaccaagactaccagcccagagatgataccacccacaaggggccctccacccttgatcactaattgagaaaatgccttacagctggatctcatggatgcacttccccacctgaagctcctttctctgtgataaccccagctgtgtcaagttgacacaacaccagccagtacactgtcacggtggggaaggctgcgcctggcagtctacagcctaagtgaagcgtcaccaagaacactgtgtaagatacctttggactatccactgtgtgcccagtaggaaatgtaaaggagcctcatgtttggatttgggctcccttctctgagatagttcattatacacacccaaatgccagggtgcaaaggaagaccagtccaggctctgacacaccaggctctgacacaccaggctctgacacactcaagttctgtgagctggatgaggaggatatgacccgttctgaggagtggggatgttcatggttgttttgaatgtaagctttttccgtgttaataacataggaatgtttgggttacttatttccttatttttcttaatcttatgtctgtgttaatgtacacaggtgtgcacacatgagtatgcatgcggaggtcagaggtcaacctctggctctgttcttcaggggctgtctgccttgcattttgaagcaatgcctgtctctcagttagacccgatgctctcagatgtccaggagtcctagtgtatctgcctgtctggcactgagaatgtaagaaggcctcaccatgcccagctggttggcatgggtggcaggaattgaactcagggcctcgtacttgcatgacacatactttacctactgagccatctccctagccaggtaatttaatcatagaatgttttgctcttgtaatcagtgcaagttcatttgtttggtagtgctagtgttggtgtatatagttagttccactgtcctactcccagggacctagcagttgcttatgtcagtgcctgctgccaggtgtactgcagacctcccaccatctcagctcgctctctctgttcttctccacgcttggcccctctctctcctcctctgccccctctgccagttctcatggctctgctccttgtctgcctgtcttcctgctcccaatctgcgtgcctctgttccttccccaggtcctcacttctctcccttctcccaataaaccccttttacaccagatctgttgcatagggtacatttctcagaggggtacacctggcatgggcccaccaaaggtatccccctcgccacattatttcataacagatacagtaatattcattgagatacttgcatgccagtcactcaaacagcctggctgaagtttgagggtggggagtgtggcacttccagccctgacaggtgggaagtattggaggcactgaatgggagacactgcaaggaacagcccataggaactaggtttgggggaggcactgagaccaattggagtgtgtcctgtttagggagctattgtggtctggaggaggcccatagtcaaccatccagaagcgccttgttcaccacaggaaaccagctgtaggtagagaccactggcaatctttaaagtgtttttgagaacattcttattttgatattctggagtgtataatggataggcttttgaattaacaaaaaaggcctcaacagaatgaaaattagccaacctgacatgaaagatcttgaaaaaccaaaaatcttgatgacgtatgcactgaaaacagttccttggaaattgtgataaattgagacaaaaaagaaacaaaaataatctatttaaattgtattaacatgttctctgggagactgaatatcctacagtatccattcacagtggtgggtgcctttaaaataacaaaggttacattgtcccaggacgtctgcagagtgctgattaaagtctgatgcagtggactccttaagcactctcatgcccagagtattttactcatgttttcacagtgtcctagtcaaaagacgaacttaaccatctgaaattgccaagtcaaaccaagttaatagctatttatgacctagatggtcaaaactgattggagaagtccacacgtgttacctcagaaggaaaaataatgaccctatttcattcccccaaggccacgatgactgaggtggcatgtgaacctactgggcaccacacggtttctcagactttggaaacagatctcacaccaccctcttttccatgggcatgcagatctttggggatgatccttgtggtttattccgtcagtcaccaaagtgacactgtcactgaaggacatctgacacgaccgaatatggaagccgagtagtattgggccaaggctttcggaagcattgagtacattaccgcttttccagagagtctgcaagccccccgcgataaccctggcagtttgctttggtgcctggcctccgcgcatgcgcaggaaccacctctcaaacttccgttccatgtgcgggcaacacttgggatatgatccggcctaatgatgagagcagtgagtgggcctgtcatgatgcttaatgggccagacactacaccgctctgggagagatgcgactgtgcatgcaagcatcactacgtccctttctgtaaagactccaccgtgacaatgagcacatcattcctcctgccagatttttggtacaaaggtctgaggaggttacagaagtggacgcagaggaatctgcctagaaaggaacaggcagacggcagtggagagatggcacaatggcttagagttccccttcttatgcagcctggaaggagataccctgctggacatggggtgcagtttagtagtcccctcctcctccccctcctccccttctccccccccccacgtcctccatctcttgccttccattctccctgcttcattttcataagccttgttcttcacaatcttccaaagaacgaacaacaagggatgtaccttttgcagtctcacaggtcttgataactgaatgccctttgtcttctcagtcgatcgttcagtgtcttcatcaagtctgaaaacaattacttaatatttcgaaaagcattccttctaagtttccggtgttaagaagctgggtgtgcattgcccactaaagaatattagtgaggacctgctcaggtgtcctgcgcagcatcaccccagctgtggggatggtactgtgagtccctgcggtgcaggctggggtatgtgtacagatgcacttggcgagttccccagagtcgtgcctctggacagctggtaacctcccattgcttcggtgccttgtgacctctatgaccggcttgtgcttctctgctttccagtgggttctcctgtgaatcacaacgatgggctatctcactgaggtggagctgggagatgctctgggcagcaggctccctggctggggcagagcaggtgttcagatgcttccaatagcaccagggttaagggcctgtatgcccaaggctcacctgatgccagcgaggtacgggaacactccgatcccattaggtcctcctctatccagcttcctctctccccaaccctctcccaaaaacaaataggaaaaccagaaatggactaaacacagtctatcaggaccatagcttctggcttaagcttgacttttctcagcttacttttttgggttagcctcagcagagagtccagaacctcatggacctggacccagactctgcggtgctgagtacaaatcaaggcagattgtacgcgcagatgtaccatttccccggaaggagctcaagacttccaggcacattgtggacagatgagtgccctgccacgtggggcaggctccatccagccctgccctgggcttcaagatacctgaccgtgtcagactgttcattgaggacaacgccggactttcttctttccatgtaacagttggataagtctattctatataataactcgtcttcaacaggagggcttaagaacattttaaaatcttttaagataattaaacataggaaataatcttgcaaggtatggagtctgaaggtgctgtttgcttggagtctggaatacctaaaaaaaaaaaaagtctaagaattccataagaaatccctgattcctgtggaatcttgaagaatctgatgactttagcaaaacataccctctggccacctcctttaacttgctggggactatgggccccacctgccatatgctatttgctttggccaccagatatttgtagtagctctgtggctgcttcaagagatagcatcggggctgaggaatggtgggatgtcagaacatgggtcacagaataagtcctaatagtggtgggctctgccagaagtgggaagagagatgtttcttaacatcatttttatccgcgaagtgcattggaaggctctagccatgttgttgttctgaccctggaatgagctcattgaaagtccaggctgggagagaagttgagtgtgctattaagtgacgcttccccaaatgacctgatcctggtggtctatgtaagcattaagacaaagcaccgccttccgcattagcctgcccatcttaagttgagcagggctttctgacaccacgttggcttctctctgctggatcccctaaccctaatgcactgtgctctctacctgtgctagggctgcaacagccagccagccacccaacgttctgcactgcctgttcctgctgtctgcaatagggcctcgcattcagagtctgctggggccagtaaacagaacttgcctctgggctacactggtggaggctgaagccagagggattaagtgatttgccttcagtcacactgctaattagtaatggagccaagattagagtccctgtctggcagcacctggtcctgagcccttccttggccacctcctcccagtccctctcatccttgcttcctggcattgcaatggaacccgagtttcccttctaaaataaccttaagctgctagtgaggcattctttcaacatatgtttagccagttggtgggtaggtatagtttgtgattattcgagccattctgcacagctgggtaatactgtaacctcagcagcaggcaccgaggacattccaggaatacatttccacgctaataagtggactcggtgacattggagttgtccagaacttgttcactcatctagaacataacggaacgctctagaagtgcatgcttgtgggctataatggcataaggtacctgaggttcatttttgtgcttttcatggtatttaacaacagtcaagaagagagtgttccttgttctgccagtgacaagtgtattcccctgggctttagctactgagatgttggatctctttttatcaagtctccatctctcatccacttcctatttttgtttcatggttagtcagtatttcctatttttaaagggaggtggggggatctctcagtggttaagagcatcttccggtcttgtagagaatctgggttcccatcccagcacccactgtgatgcagcttaagactgcgtgcacctgtaactcctggagttctgactacctctcctggcatcctcaggtagctgtatgcatgtgaagataggggaacacacacccatgcacatatatgcttgcacttgtgcacacacatgaacacatatgtgcacgtgcacacacacacacacacacacacacgcactaaatcttttaaactgtaacatcacccagtagacttccctttgtagagctctttttgtttccagttactccattcatggcacgtctgtcttgttcttatggctgtcccctttgcttataggaaactttgtgaagttttgggcttttctcttctattaactttctaataaaaaaatccatgcacacaaacgacatcacacactgaaactaagcagccctaagctttatacatctcagtgaacatctgtgtagttctctgtaccctactgtagaaatatttgcatcatcacgttgctgctttattcactgtagcaaaaaaatgataatcaacctagttgtccatcaacagttgaattaataaggaaaatttggggtgtgtgtgtatgatggaatactgttcagctctaaagcaatgtaatcttaagaacttgctattttccatgttggtcttgttctgggagtaattttcattttcttgttcatgccgagtctccctcacaatttagacaaccttcatatgttttgtggtccttggttctctgtgcagtgtaaaggtaggcactgtaaggtctgacaagatgtcagtgcaccggaaagctttgttagctatgagagtggctgtggggctgtgggaaggaatgtagttattccaggggctttgagttcagtagcggaaccacctgtgtctgtgtgagctccttggttctccctggacaaggttttaggctctgtagaaagaggcctctctttgcagtgtggagtggaatcacttcgctacagattgtctggggtcccgtggagtatacttgggaccacacactaagcgagagatctaggcttcagtctcaatctatgttaacatccaccagtacattgagtggcttttcctctattagcagattggggtagagtggatgcacacgtgttcagctatcgtctcaaatgggaagcccgatgttggactgttgaccgtggcagccacccaaaagcagcatctctgcgcagctttggatgtttgagagccagaggagcagagtttggcttctccactcagcagtgtgcagcatgtctctgtgtgtgtcctgccacaactgcctctggtgttgcgcacctcgggtgaactgtgtcttctgggccatctgaacagcatctgtgttcatcctctctcacctagggctgactgaacagcaaggacaatggcagcttactcatggtggagacagccatcgtggatggtagacaataaaagatcgaggatgactccaaacctgccatggctcctgtcagctctgaccctcctgcatctgacgatgcatgcaaacggtctgaagagaggtaagtgagcctcaaagcaaacggcaagctggttggcatgcgaccgtagagtagtcctgtttctctgctgacctcttcagggtactgcttaaagtccagttctctgcattctttttctcctgtgtatttctagtttctttttaaaagcccctttattaaagggcaatcaaaatattcctttactctatacaaataataaagcataattctcatacaatgctgtccattccttaaggatacagttctctgagttttgacaatgcacatttgctaaccacaggcactatcaagatctggctctgttccagaacacagaaaatgcccactgtgtccctgtcgccagctctttccgccccgccccgcccagccagccatgctgtggtctgtctcaaatgtgttttaagaatactttctaaatggaatcgaaaattctttcctgtgtctcctgtgtcttattttgaaacttgaagaatgtttctgcagatacggcctggcttatttctgcgagggatgtcttccctctgcccattggccttgtcttcacgttatttacacaattaagcagactgctcccccccccaagattattgagtaaataacttgattgtgattaactgctagtttctcatgcgagcatttctaaggcgtttctgcttttttgtcttatatgaacttatattttatggcgactgtgaatatcatgtctgtaattcatgtgtgaagcatgaataattataagcttttcctatttggggtcggggttagggttagctttttcatagacattacagagcataagatgatttctagtttcctccttcccccttttgctcttcttccctttctcttgttcctctttctgactgtccctctccctctcttcccccccccctctccttttccctaccctttcccatcctctatgttctcttcctttctcttccgtattccagggtgactgttttttttttctccccgagtcagggtttctctgtatagccctggctgtcctggaactcgctttgtagaccaggctggcctcaaactcagaaatccgcctgcctctgcctcccgcgtgctgggattaaaggcatgtgctaccatgcctgacttttcattgtgctgttcttacacacgtgccttccataatgtgacgtcacagcactctgagttgatctgagttgcttcttcccccattgttaaagccgtacatacaagactattttctgtaggtcagtgtgagttcattgcgtttgaaggtaatgggctttgcagtaatgaagagattgattgtaggttcccgtggagctgcggtctggtgtaaggagtgcagcagccgagctaggtgggtttgtaggtgtgcggtagaccttgaggctttctggaataatcttttccttagaggtgtttgcttgtagtgtaaagtcgtgggtattattccactaccccattatagttggctttttaattaaaaaaacaacaacatattctcacccccccccctttcttaattgattgcagttctttgtctaggtgtgaggcctattgagtgttcccccatgctaacatatctattggtatcttccttgttcaggtattgcataggcagacctcctggctatggcctccgacatttccaagagacaccatcccacagcacattccctgttcctctggcttttacagtcttcccactttcttttcccagtgatcccctgagcctaggttgtgtgtagacaggaattacattatagacatatataatggctctggtctctggtcttcagagttcttcacttggatctattgcaattttatgcagtggtcactgccacaaagagaaggttccttgatgagggatgaggaacaacacttacccgtgggcataaggacaaatatttagagtgcagttaggggttgtagtggcttagtgaagtggtagttgtagattcccctatggtatccatgacttcggtagccccagggagttggttagattcccagtggcagacatgacttctctcactcttgttgagtgggtctgaagacaagaaagccgctggttactgccaagataggagagagtgggagaaatagttattcccagggaggagcttaccagtcggtaactaggagcaatggtcaggcctgaaagctacataacagtaacagtatgtggactacacaggctatagtttaagtattcaagaatacatatgtatacatgtatatgcacgcacacacacacacacacaagcatatacgtatgtagacatatacacacatgtatgtgtactaacaattaacaacaattgaagagagaaaggctatgaatttgaaagagagcaagggagtatacatgggaatttaaagggcagaaagagaaagtgatatggctgtattataatcttaagatacttagaaaaatatttttttaaaaaccctcaaaaagtaggcaaagcaccggtgaagtagtatctgatgactgagacctttcttcctagagagtggccttctggaggcccaggacttgtctctccactgagaccccagagagccacacgcatgctctgtgtcatgtatgtacatgttgcttttccttctttaggggtacaagacttgaaatgcacaaccaacaacatgcgagtgtgggactgcacgtggccagctcccctcggggtcagccctggaactgttaaagatatttgcattaaagacaggtaaggacatccggggtgcgtccaaaactgtaacccggagcttcttccccggttatttttgagtgcgacaattttgttcctagattttaaaaggacatttgcatttaatcttctttctcttaaaaattccaagttttacattagtccagactcggtcttctagccaaaagcgcttttcctttgctgtgtgcagtgtgaggatggagcaccactcaccatgtactggtctgctcaggggggtgtctactccaagccattgtctgcctttatcaggttgaagtctgtgtctaatagaacacgccagcaataccagctccccacacaggtgtcgactctcagggaagtggtccggctgtaggcagtccagggctggcacagttgtcaatgagcctgtccttgtcctcaggtttctttgccatctcttgtctggaatctaatggtttaggaatctcatgatactagagggacagcccttaagtctgcatctgaagaagcaagcaggaaaaggaaggacgattttctatttaaaagactcataagacgtcccataaaacacctgcactggccagacctagtcaggtggccaataagtctggctcctctagagccttggagataagttcttctaggcgggtgacaaagctcagaaggcaccaagtccatgttattaagtaggagggtcagtgggccttgggtggtaggggaagctcaagtagccttgagtgggcttgacacatagcttcgtagagtggaggcctacacagtgtccttcgctttccccaaatcccggcaggacagcgaattacttagcaaaggcccacaggtttatcaagcttatctccaagtcccggtttacaacccagtggccccaatataaaaggacacaacatgtttaaacagagccagatattccctttctttgtatatttaccaagcactactgcagacaccagggtggcttgtccgttatgacagattagggtctgttgcagaaacagccttcaaacctttatattttgctcatgaaaatgaagggctggctatgttctggtgtcagctggggtttccactttgagcctcttcttattatgaagtcattggtaggggacaaaaagaatatagcccgtgttggcttttagaactttcttcatcaagtaggtatccatgacttgacttcatatttttctggccacataatgtcacatggccattccttgttttcagagggacggaggacagtcttaccttgagtccaagggaggagatcctagaactttgggtaaatggtttggatgctgactgtggcacgtgggggcgaaacttaggtcctgctcaccaggggctcacaacagatagcagcagtcctgtgggtggcttgctggccgaagtgaaggggacttacaaaggagaagaaaccatggagtatgtcagaaggcacatgcgtaacttgctttgtagaaagcgagcaagactttgtacccaggataagctgaatgaagagagagagagagagagaggcttgtgctgggggtgcaggaggcctggaaagttcttattggtaaaagcaagagtgtgaatatgcccttagagatacaaagggccgtgaaacctgagagagaaagcagtggttatctgtgagactcaggggatcagaagccttccacatccgcgtgatggggtcttgttgaagttaattgtgagcccagtgggtaagaagagagggtgtgtgcacactgaccactgtgtcctgtttcacttctgccgtggcctctgttgggccctgcttccactacgaggcactaggcggtggttccttcatgttctgtgctgaaggggacagtgtgcctggagcagagctctggcaaggttgaggtgggatttgaagagcgagccaacctcgaggctcttcagagccacgcctgcttgctctgtgccttctggcaggcgggacactcttcctcatatcgccattgactcctctttttgtcgtagcatacagtacatgcaacccaacatcacacaaaagcatagggcactctctagtgcttccaatgttaatcaggcttttataagcggggcgctatttttatctgctatttaaagttccctgtctttcattacaggttccattcttgtcacccattagagacaacaaacgttaaaattccagctctttcacctggtgatcacgaagtcacaataaattatctaaatggctttcagagtaaattcacgttgaatgaaaaagatgtctgtaagtacttaaaagaaaattcggttctatttgttatcatcttcagcatttgcttttctctctggccacaggaccttgccatgtagcctcaggctagccttgaacttgtgattttcagcctcaggccccaaggattgggctcagagttatgggtcaccacaccaggtggaaattaatcttaaatgaacaaagtctctgttgatgctgtggtgctgggtcgctggctcaaactcacaactcattgaagtttgtttccgttgctgctgccgttcacatggcgggcgtccttgctaaggaaaggagccagtgtatgtatcctccagtcagagtagagaaaatggaggtccttccctctctctgtcctatgctagctgccgtagcctcgatgcctaaacgtgccccatcatgcctctggtgtactttgttctaggagtgtagtcactgaccaccccagaggtgaccctgccccacggtccactcacacttgcacatcgtcctttgtggcaaattccctcagttgaggtcatagtccatccattgtgtagtttggcgcttaccacgtgtctacgttacaggaagtgtgttctgtgagggaaaggagggaagggacagggaccttgtgatctgtactgtgcacaggcaattgctctacaccagcacctagggacactggccaccagtacagaggaagggcagaggcaacttaggcaccctgacggagaacttgaagttcacaggtttctctcacggcagcaaagaggtcagagcttttcacccatgagaggttggagtcatagtgacagggtgagccggggaaggttactgattttttagaccaggggatgaaggtacagccaactctgatttgttcacttctgtgaagtgtaagtgttggaatagatctagtcagtcacagtctttcctggttgccggctgagtgaggtaaagcgctcgctcgctggacaattggggctcagtcgccagagctcacgcataggtggaaggagagagcagatcccacaggctgtcctctgccctgcacacgtgtgggggtgggggtgctgtgctggctgagccattttgtcaatataaattcctttctatctggaaagttctgggtttctaaaggtcaggttaaatcagccccttgatgtctgttttagacagcaagcaattcatgggcctctgggcagcttgctttaccattaggaagagaagggaaaggaaagcagggttttgtctcttcccttttttatttttaatttttgggtgggggttgtcttgtaaatccttttgtttgtaatcatggccgtcattgtctctcagtaaaaatagggacagtgacccatctgctaaagagtaaattatgtggatttcttagagaagggaacatctgtctttcttccttcctttcttccttccttccttccttccttccttccttccttccttccttccttccttccttcctccctctctctctctctctctctctctctctctttcaatctttctatctctcaatctctctttctctttcttcctttctttgatatatgtatgttttatttaaaaatgcatacagccgggtgtggtggcgcacgcctttaattccagcacttgggaggcagaggcaggcagatttctgagttcgaggccggcctggtctacagagtgagttccaggacagccagggctacacagagaaaccctgtctcgaaaaaaacaaaaacaaacaaacaaacacacaaaatacatactatgatgaaaatcacacaatgtattttgatcacattctttctgtcccctaaatcctcccagatccccacttccctacttagtcaaattcatgtgaacaatcaatcaaacaatctggaaaaaaaaaaagaaaaagaaaatcaagacaaaaaaaaaaaaaaaacaacaaaaaaaccaaaggaaaaaaaaacaaaaccaaaaaacccaaaaaaacccaaacaaacaaaaaaaccagaacaaaagcacacacaaaaccttggagtcctttctgttttggatggctgctcccaggcttgggcctgccctcggctttgcttgatttgcccagtgactctccactggaggacaccgatttcccctttcttatcgagcatcaattgcaaatagcttttttttttttttttggagtttagggagggactttgtgtccacttccccttctcaggatgactgggattttgtctggtttgaacctgtgcaggtcctgtgcttgctgccatggcctctgtgttcacctcagtcaggttgtgtctggaggacagtgttccttccttcccttcaagtcaggccaccacccccgattcttaccatctttccacctcttcttttacatagatcctcgtgaggaggggtttgatggagacagcacatttaatgaccgagtgctctaaactgtctcaccctctgcacattgtccagttgtgggtctctgtgttaattactgtctataccgcaagaatagacttctgatgagcatcaggcagcgctctgacctatgggtatagcaatatatcgttagagtcatcttactgctatgatcctctagtagtagaatagtagcagtaggttttccctagggccatgacctactagtctcgggctcttggctactctagcatgtcacataagggttccatctcattgggtaggccttaaaaatccaatcagaatatagtcggttatattcattccactgtcgcaccagtctactgcaggcaggttgctgggcttgtatttggaaatctatgattactttctccctctagtagtgtgcaagtaccgtatgtgctgggggggggggcagggcggaggttctagttgagtacagctcaatttctccatgttcaattgcattaggaagttgtgtcttcagcaaatagggctttaccattaagttatggaggataaccagtagaattggcaatcatctgtgatatttgcaggtggtggtggtggtgtggcacttctttggccaatgactcaaataagatataacccatttcctggcatttgggggtgttacttcttggcacactatgtcctgttgggacattgtctcacccattatatggtgactccattcatttaaattccattcatatgtgtatgcattttgagagctcctatagaagtaggtctctatatggcttatcaaaaggtccccagtgatagtggtataagggaagcatccctaacaggttagcattgctgcaggatgcctgtggcatcatgtgtaagtcactgtgctttgatgtcatgaatcacagccttggatgctgctagctctgtcctggttgtgctggcgcctggaccagctctctcctggcaccaggtccactttgtgcttctcgattatcagtgctttcacatgcagcttccacgtcagcagtcgctctctgcgaagcacgcatgctcagtgacatgtaactgacttggttctgtagctcacactttaaatccacacattccaggtcatgtgcagcaataactattaaatctagtataaaacgccgtgttcagcaaatgatttacaagtttatttttaggtcccaggactgtcaggtggtgatggcttattctgcctgtgtttgacaggcagctgacctacccctggacatttatttcttcttgcagtttctcacttaccatgactttacttagtggtcccggaacgtcataagaagtgactagaagaaagaaaagaaaaggcacacctttgcattttctctaacttaccttctcacgcctatcattggaggaagaatctggcaggaacgtctatgtctgtttgtgccactggcattgacaaggtcacacaagcgccttctttcccatgaggctttgatcgtgtgctgtgggcagggagacgagcaaacttgagcatctcctgtcctgctacctcaggttacagcttttccctccacgcatgcctgaattctcaagcaaggtttattctttatgttctataattcagtgtcagagccacagctgtaaggccagacgagcccttccttctttgagttgtctgagccacggtgttttaacacagcaatagcaaagtaaccgaaaggaccacaccctcgttcctctctgtactctcctctcttctccctgaacgctgtcttatttggactattggacacttgctgctgctcagcatcatggtcttggatactgtactgaagctgcgtgccggctgcggggccagcctttgtaggccttcagagttagttagccattggctttggcgctcagtaccagactcattagaacagtctctgttgtttaatgacacccacagcttggagcagctctttgaattctgtaagtggggggcgtccccacatgtgaggggctctgctcctggaagacacatgagcggctgtgagagcacggaagctcttttcccagctgtcagtgttcttaggctcaggctgccaccacccaagcaagctcgttggctgcttcctttcaggtccccagctaggaaaccctggtattgtggaaactccactgctgcctgcagtaggaaatgtgtcacatatttgaaacagccagctgatagttttctcaggtttgtccctttaattaactggagctgcctgtacaaataaaaaccttgtcgggcagtggtggctcacgcctttaatcccagcacttgggaggcagaggcaggtggatttctgagttcgaggccagcctggtctacagagtgagttccaggacagccagggctatacagagaaaccctgtctcagaaataaaaacaaaaacaaaaacaaataaaaacctccatctcttcctttttttttttttccccagtgacatggttttctcaacggtttattatcatgccacattattacattatttatttatggagtgtagaagttattgataaattgaaaaacacattgtgaaaaatatattatttaactaaatgtcttcgcctttcttttctgttttaagctttaattccagagactcccgagatcctggatttgtctgctgacttcttcacctcctccttactactgaagtggaacgacagagggtctgctctgcctcacccctccaatgccacctgggagattaaggttctacagaatccaaggacggaaccagtagcactcgtaagtttgagcaaaaatatatttccctgtgatataacgaaaccttgcagcttttaaagcttttgagggggcatccatgagtttggggattatcaaagaaatgcattgtgtatccttaggggttctttaagagcccaataatgtgacttaaaaatcactctcaggctgatggggtagccacacaagcctggctgcccgagtttgatcctggagccctggtgggaggagagaacagagttctgagagttctcttctgacctctgtcgcactgtggcatgtgctgccccccccccccagacaatgacagaaaaattagcaataatacaaaaatcactcatgttatactaattcataagtttaagaaattaaggggaaagctattccctgattctcccccttggatatagtaaatgcccagtctttcatttaagcatgctcttacaataaaaaagtttattttgggtttattttattcaatctgtaactttttttgtccattactgacatcaaatgaatatttcaaacaagtttaacaataacaacaacaacaataataataaaataataatagagaagccagtaatctttaatttagcagtctgaaatgacattgttccatacagtacttctctccctctccccactaagtaagtagccccttgggtttctgtaatttacacttgctttccactagctctaagacgtgaggagcaggtatggaaagttggacaggggccatgtggacactgggacaagacggatgctaggcagtggtgtttcatgtaagatgcagaccgtgcacagccatgggaaatgttccacagagctgaaggtagacacagggagcccctgagctgccctgaagtgtgcactcatacatgcatacacacacacacacacacacacacacacacacacaccccttcccacttgtctctgtttggaaacaagcttgcatttgtgtatggagacagggcctcactgtagcgtgcagcaccactccggccggccttcccagggctaggattgcagctacatttaactcctccagatcattcctgctgtccccatctccatgccccaggcagcaggcccatgctgctattcctttagagttcccggtcaggggtttattaactgcccagtggaagatggaagccctttcctctttcctaacccactatgtctcgggctctctggttccccgctcccttcctctcttcgttcccatccaagtttcctaacttcttcaaatgtagtcgaactagcgctgagtaatattccaaatattagcttcaacctcatctttttacggagcttcttatcctaatttctctctaggccaaatgaatccattatattaggtatttttttctgtttacctttgtgtgtggtcctgaggctgaccctcctccataggcatggatggcagagtggtaaattgctgagagattctaactttacctatcagaagcttaaccagcctgctcccgcccagaagatggcggcaagtagaagcttcctctcttacttctggaagcgtgagaggccagcgtcgggagcagggcacagcgtgccttgggcagggttgctagtttaactagatgcagcttacacattggaaagttttaccggggttttgaaggggatcctctgttccttaattgtgtggacatagcttcatccatactgctgaaccccgagtggctcattatagtctaatctggcattgtttgatttctttgacccccctgaccccctgtttcccatctgcccttgctctgttttctttctgtctgctccttctctttgctttacttctttaagatatggatcccctggtttttttctccatgagagtatggaaatcatttctatagcagtgtatcctcttcgttgttttattgactgctttgatgagtatcaacccctgtaaggggatggaaggcaatcccataggaccaaatgctgacaagggcacatagccaggtaatgatcgtgttggtgtcacttcctcgttacactgtgtagaaacagaccgttgtacagtggtgcggatcattttcctttatagcattacccacccggtggctgatctaacatgttccgtgaggcctttctgtccctttaccctggagaaaggcaggacattagcattatttggaagcataattttgtgtttgcttttaggtgttactcaacacaatgctgagtggtaaagataccgttcagcactggaactggacctcagacctgcccttgcaatgtgccactcactcggtgagcattcgatggcacattgactcgcctcatttctccggttacaaagagtggagtgactggagcccgctgaagaacatctcctgtaagcttactcttacagacccttggttcacatgggctagattgcttaagagtaagggttggtatatgcccatagtgtttttttgaatccaggtagctatcttccaaagtgaccaccccagaactgtggattaaagaaatctgagacccgctctagaaagctgggctgaaaaatcatgtgtctattaagtacaactcctctaacagagagatgtaaaattctggcagagtgagcaggggcccccgggtcatcagagtcagtaaaatgaagtccagaaaccatccagtgtttattacaggtggacagtctgtggagcaacatcagataaggggggccggaagcagctggataaataaggagactctggggcagttgagcaagacactgtaaatataaccgaggacagctgagttcagacaggaagggacgggagcagcagaatctgagttggggaccaggtgcttgtgtctcccaacagtgtctgtccctttggttggctgaggggtaggggtgagaggctgtccacagagatacaaaagataggaaccagttggttgggaaaggacagtttcatctttaatactctgatctgtaggcagtgaggttgaaaaggtcattcgggcatccagagacatgggcgtagctggggaatgtccctctgggaatcacaaaggtgtatgtgattggaagtgcttaaattctgaaggccagtgtatcttcgggaaagggaattgggacgcacggaagcgctcctgtctacagcactactgaaggaaggtctagcctgaggactaagagtggcccagaaagttcagtgtggtagaacccaagagaggagggagtttgaaggtgtttggatgataaatcggaaggggcccttggatcaaacatggggccggtgagtcccttcagtagaacggtggacttagaagccagatgtcagggaagagtgagggataaagggcaccagaggtcactgtgtaaacaccagctgttaggagtggagctggggtgcgtgaccttgacctgcaagggcattgattaaagcagcagctgtgagttagagtgtggagggcttccccacttgtttgctgaagaacataggagagtttcaaaagaatcaacgtgaaacttctgaaattatcgagtgattctgtgtgcatcttctgcatgtgtatataaacccttaaaaattaacctgtgaccttcaacaaacggcctgtgatcaggttctgtccctgcctaagtaaataaggctacagtttcactttgtatttgtgtcgtactcctttgaaacccgagtgtggtgccttgcactgggggctgcattatttcacaacatctacagtttgctttgtaaatgttgaactgttttaagctctcgaatgtggtggtttatgcctgtaatcccagcatggagcaggggcaggaggattactgcgagctttaggccagccttggctccatggtgaaatacaagccattctgggttacagaataatgccttgtttcaagataacagaattgaggcactctgttggaaaagtgccctccactcaggcagttctgtggccccaagattgatccccagcatctccctcaaagctgggtatcgtaacatcgacagccctaagtctctgagggtgggtagagatcagagcttctacttctgtctggtctagctaaattagtgagatccaggttcagggagagcccctatctcaaaacatagagtggagtgacattgagaaagacaccccatgtcagcctttagtctccatacacatacgcaagcatgttcacacatcacacacacatacaaaaataaatacaagaagaaataagtaaataaatgaaataaaaatcattccaggagacagaaaggatgtcctgaggagacaggtgtgagtaaaagatgtctgaagggtttgtgactcctcctgtttttttctagggattcgtaatacagagactaatgtttttcctcaagacaaagtggtgctcgcaggctcaaacatgacaatttgttgtatgagtccaacgaaagtgctttcaggacagatcggcaatacccttcgtcctctcatccatctgtacgggcaaaccgttgcgatccatatcctgaacatccccgtttctgaaaacagtggcacaaacatcattttcatcacagacgacgatgtgtacggaacggtggtctttgcaggctgtaagtgtatcgtgtcaaatagttcctctcagccgggattggtccgtttccgaccttaatgtctttcctgtgagctgattctcttttttccttattttcttgtttaatacacacactctagaggcgggacttacttctttcacacctaatcctgtcccagttctaagtctcataataaggttgatgaggttgagacatcgagcaactagggtttagcttaaattcttcacttcagaattaggaatgatttcatacacatttgttttctgtttcactaaagtaaatccttaattagccaggcttaaatactgcatactgtactgagtatccggtttataagtagcttatttgaggacagcgaaagactagggtgaggagtcttaatcttcatgcattctgcctgtaatgtgggtccccgcccactcctgtatcctaaaaccagtctagaacttgtgggattgggctgctcctcccacggagcttgtgcagagtatccctagatgattctggttttaggactctcagttttgacattgaactttctccttcctcccctgtggggctacctgcaaccgggatgcccttgtgtcccaaaatgagaatttctaggttctgagtttgctctctgggactcatgaataaaggtgtgtgggacagttggagtggatgttgtgatgtttcttctgttttaaggagtttatccctttatgacagctaataattgccgggatatcactaggacctgagagagtcgggtggctgttgggttgatcctccttttgtctcggcagcttttggaacccaaggcacagtcagcttaggttcacacttaagtttttcaaatcgccttttcttcctcatgggatgtggggacactctttgtaaccgttttccaaatgagccggagcctaaaatgagaggcagtgggaacgtagtgaagtcactccagaggaaacaaatgtaaaaggagggctgtgtgtgtgtgtgtgtgtgtgtgtgtgtgtgtgtgtgtgtgtcagggatccagaatacttgcagctcttccagagggctcagctcccttcccggcacccatgtggtggctcacaaccttccgtaactcaggctcctggggatctgaggtcctcttctggcacctgccggcaccaggcacacacgcagcatatattcaaagcgctggtacacataaaaacaagaactaataaagctttaatacatcacacacacgcacacacacacatgtgaaaaagcaaaaatgttttaaaaaatgaggatatggtgttctgaagtaactcagtggggaaagcactggccttggggtcatttcccaggactgcccaaatgggttaggtagtggcaggcacacaggcctgtaatacatccctagccactcctcagtacaagcaggaggctcaggacttcaagctcaccctcctcctcagccactcccagacccacctggtctacattagacgccatctcccaacaacagaaaagttaaaaattgagggtatgcactatagacacatggtttccatcgctgtgatttcagacagcattttaatattttatcatgcatggcactggagtagaacctttaaagtcttgcttcaacctttgtgtgcaacagcggaagcttggaatatggctcggtgttcatcagctcagggcggtgcagcagtagcctttcccaccaggcaaactgagtcagaaacttccaggacaggttctagtataaagtccagatcaagtttgctgtcttgtcttgttttgtttttgttgttgttctgttttgctcccttaaaggtatactgttaattctccatttattaaaaaaaaacctttaaaattgtttactcctctgaacacattcagactcaaatgtagatcaatggaagactctcattcttacaacatgacaacgacaacccgcttagtagactattgtggcagtacacgatctcctatgtctttggttgagtttagtcttagcagcttgctgttctctgatgtcagtttggttatgtttgggggttttggagacatggtctcactccgtagctctggttggcctggaattcctaggtagtccaggctggcctcaaactcatagaaatcagttttcctctgctagacggtgtagaattaaacctatgtgtcgccatggtactacttaatggctttttaaaaaaattacatgttacgttcactggtatattaaaaaaatgatctgaatcaagatttacccaatttcaattgaattcttttctaagttaatttctttgcaaagggaatcggtacattttgaacattctcctctcgtttccttttctcttgtcacactcctgtttctttttaattcattcttattatttggactttgaatagacgaatgtgtatattctataccctaaagttatcatcactgtaaattattctaagttccagcatgtcataagagtggtagataattttgtcttgagttttaaaataactttcaaaataagcgtatcaatgtttaattaattgtccaatagcaagactgccaaacattccctcgccatcctcggtgtcagctaaaatgctagcagaggagcctgggagacgtcagtgagtaagacacttgctgcgcagtcccatggcctgagtgtggtccttggaactcactcccataaagacagaaggagagaggcagcaggagagagagcgagcccccacttaattgtcctctggccgccgcacgtgctccatgacacacatgccccacgtgccgtgcacacaaccaatattaataaacaaagaatgttaaactaaggaaaccgttacggggatctcttgggagaatatagaaaaatttgtgttttggttgacatctacctactagttgaaaaattcagctccttcaaaaagagtattatttctacagaatattttaccaggcagattcttgtttttaactttaatagaaaaatgaaaaatacttgcataaataccactttaggatggatctgtatctgtagctgattggctatgcaaacgtatcttgtttaatcaagcgccagactataatggttttagataccacttgaaagtttttgcaccttcctccccagaagtgacctttttctttgttctctgccccaaagtaaagccagggcgaatggttcctgtgagcagcggctgtggcttttagcatcctgatacatccttctcagccacagtgtgtgaatagatgggatatggtagccgtttcacactgtacattcccagggcttgacttagaagactttgaagtcaaggttaaggaaaagcaatttagttcatttctccatttgctgttgggagtttgcataggagctgggttgagagtaactcctcagagtcccttaataaactgttttgaatgcaatacaaattataacaacacatcttgctgaagcagtgatgatttctgccctatccaaaatggaaatgtgtaaacagccaattgtttttagggaattatgcaaaaatcccacttaacaaaaccgtaaaactgtagattggaggaagacatgtgtaacccctttgtctttcttcttcctgttagatcctcccgatgttcctcagaagctgagctgtgagacacatgacttaaaagagattatatgtagctggaatccaggaaggataactggactggtgggcccacgaaatacagaatacaccctgtttgaaaggtaatgtcaaccaggaaagagtgctggtggcaaaaagtctggaaggacctgttgagtgacacaggagtgtcttggcacattgccaccattgtcacggatgtactgtggcacagggcagtgtcctggcacattgctgtattggtaccttatatactgtaatagctgcagttgacctgcatgcagctgcactttcaggccttctctctcagatgcctaaaaggaagtgcctctgatgtggtttgtttatgcttggctgttttctatatcacacatggttttatgaacctgtgatcagtctttaatttaaaaaacagactttttataaaggccagtagaaatctgctcttgttcccccaactacttacatcttacagtcttgaaattgtttttctttttaactgacagcatttcaggaaaatcggcagtatttcacaggattgaaggacttacaaacgagacctaccggttaggcgtgcaaatgcatcccggccaagaaatccataacttcaccctgactggtcgcaatccactggggcaggcacagtcagcagtggtcatcaatgtgactgagagaggtgagccactgttaccaggcagtgtctataaataaccacaataaaaataactcctaaaaggtgactgcacggattagtgtttactgtttattttctttagaggttttctcaattttatattaattaattaatatattcatttataatttttattgtaagaattaaagtaaataattttaaatctgacctttttttcagttgagataaaaatttgactcatttagatcaaaactatatatggctttgtttactcattcttgaattctgaactttttttttttttttttgccaagttcttgaaaacatttattttaaaatacttttttgactcagaagtcattgcaaaaatagtgagtcacaagtgcatgaatccgactgtctttcctcagcaacgacccccaaaccagagcggtgaccctggtgcatattgttcaccagagggattgccggctgcatgtggcgtgcactcactaggatgtgtgtctaaacacacagaagtgatgacggggtgggggagctccatggtgctggtggagcggagtataacttaactgtgatggcggtcacagttaagatgaatcccatcactgtctctgtctctctctgtcagattgcaccagccacctgccctgcacccccagggctatagtatagtgaaaccacacagtataagcattcaaggctggcatttcttaggataatatccttgagggacatctaaattgtacactattaattgttcatctctttgtgtgccagtgagctctgaggtttttttgttttctttttgccaatatgtaaggcaactcagaatagaagtaggacacatgtagctttttttgtggttgtctctccatcagcccagtgtactaactccatgctaggctctgcctcctcctgagacctcacagagactcatggaagacattggtacaagcaaggggtttgtcaccaatatgattactttttttttttttggttttgttttgttttgtttgtttgtttgttttttgagacagggtttctctgtgtagccctgggtgtcctagaactcactctatagaccaccagcctggccttgaactcagaaatccgtctgcctctgcctcccgagtgctgggattaaaggcatgtgccaccacacccggctcaatatgattactcttttgtcactttataaaaataatttttcttttatattatttctgtgggtatgcatgtgctaagtgtgccacttatgttggtacctgcagaggccagaagaagggggtcagaacccctgtagctgagttacaagtggctgtgagctgcctcgtgtgggtgctgggaactgacatgaagtgctctgagccatctccagcccctccttgttatctgtcactccatcctgccatgctcatttctgtttcatctgagagtcagaaggtgacactagagctgaaggttttgcttgtgtttgtctgccctgagtctttccctcctgtcctatgtatacggcttttcccttgaacctcagagtctgcagccattgtaagactccccctcctgagccacactgaattcctgtagcagtcagcttcattaaaatgtgcgagtgcacacacacacacacacacacacacacacacacacacaaacacatacacacacacccctagtacacgtggctgtcagttactctgtatctgtcattccagctgtacacacaaatctcttaaaggtacctttatcttcccaccagttagcatcctcaataccaggtaaagaacgtcgagcacattgcttctctaaggccattgggatgacatcaccagtaacaaacaggtccatgggttccgcccagactgtcttggctttggcagtaataacacctccttgttcccccctcccctgcccctactgtatacacatctactttgcttctagtttatcttactaggagagaccttttccacacttaaacgtttaaaggcatgaatctttataattctatttacagttgctcctcatgatccgacttcgttgaaagtgaaggacatcaattcaacagttgttacattttcttggtatttaccaggaaattttacaaagattaatcttttatgtcaaattgaaatttgtaaagctaattccaagaaagaagtggtaagtaaaattctcccatagctttttttttttggttattctgaataaaaaaacccaatctcaaaaatatttaagcaaatgtgtgtatacacacacacacacacacacacactcacacacacataaactctacaaacatttattacagagaatcaccaagccaagaaaaaccttataatccaaagaaatggtagcattttaatttacatttgcacatttgttactggacagtaaagagtataagttcaacttttgctgctctgtgcaacagctccgtgtaggtagtgctcattaagtttgtgagtgaaaaagtatcttttactgtagcctttgactagtgggcacagggaagtagaagggaattttacattattaagcgcatcagtagaagcaagttgaaattggtaattataagtcaaaactggactttttcatatattttaaataattagattgacttatactgtacccttctgtaatttgtggtaaccctgaagtaaatggcaccgtagccgaatgctaatttggaaactcgctggtttctgtcaaagcattcagcagggagtgcacagcttgacctgaaaagccactttgtaaggagcagcccagactttgctggcacattcatcctcagacttgtgtaaaactgcttcattttaacttcatttatattaattaaaattttttttgtctatttactacatgttcagtacataatagaggctctaggtgatacattcgtaaaccaggacacttgcccccgggatggttcccagtgtccttgaaataacacacttcatcttccagcttgtctctaattaccaaattgtgtcaaagtttaatggtcactagctattcactgattatataataataataataataataataataaacaataacatctgtataatttaactgaccctaatcatttagatctaataatcagaataaaatgcatcccaatatttaattgactactatgtgttaggtcccaagaaaatcctttttctgcggtctggcatttaaataaaaccagcattctctcagggactcaagtctgatagttcctagtctgtgcttgctcggtggaatcattctcccgatggcaggcaagaaaggacggaggaggctgctcttccattagcctatgcctgtggtgcctactagcatatcaagggttatgctagcctccaggttccctcagatcttactccaagtacctgttagagtcttcctggatggcatacacacccccagcttcccttcccttcccccagcttctccaattcctgcgtagctatcttggcgacagacttctgctctctttgctcccagtctcagtctcttctcagtgtcttgctccacccacaccccctccatggcccggtctattctgctgaccatgttcagtctggactcttctagatgcctctagctattctctccctcatagctgcaataaaaaacccttctccttaatcatacctaagagcggtcttgtactcattcccactcactatggagcataattctcttaatgccgtatttcatcaagaactaaaaactatgaactctgttgttgcaatcgcaaactagtatgacatccatttggtttatgttacaagcgtagaatggttttatacccccccctatctataacgtgtatggccgtattccatattcatacataattacccatgtatatttacttgttttcaaatagaggaatgccacaatcagaggagccgaggattcaacttaccatgttgctgtagacaaattaaatccatacactgcatacactttccgggttcgttgttcttccaagactttctggaagtggagcaggtggagtgatgagaagcgacatctaaccacagaagccagtgagtggggtgatgctagggctgatcagtaatggggagatgggagggttgacagggaggaacacttgcatggccttgagggtcatctctcttaccctgttttctgggcccgtgtactctgtagacactcagaggctgtctcactttagaatttctctgttgaaggattttctaaatggaagccaccttttatggggcattccagataccctggagtaaagtgtcaagcgcctccgttttagtcaccgatactgtcccttgcctcacagtttgcatcttcaaagtctaacttaggaatctctttcccagctccttcaaagggaccagacacttggagagagtggagttctgatggaaaaaatctaatcgtctactggaaggtaaatatctattgttcccttggatgcttaaagatttttattttgcccaagcatgcgatgtatggacggtgacttagatttggtgaatatttcaaattttacttgcttatgtagtattcagctgtactgataaatgatatacgaaatacagcaccagagaaatgtgttcagggagccaaggcttcccagcctggctacgtttgccatctcccagcctcatgtctctcatcactcccgcttccccaggcactgggacggcctggccttggctctgaaccttttactctggtcccggaagttgtgtatatagtgttcagaggaagacttacaggaattgggtcttttacctggtggggcctaggggttggacttagatcttcaggctggccagcaagcaccttacccactgagccatcttgccagcccttctttgaatttttgtatatttcctagtgttcctgtaacggtcgcatggtgtgtgggggttggggggggnnnnnnnnnnnnnnnnnnnnnnnnnnnnnnnnnnccttcaggccacgtgcttacatttttgcttctggaactataaaaataaacattgttttctattaatgtttaaatttctgtgtactttcaatacttagccacaagtgcagttctttttcagtattttattccatttttgtttagacttgccccaggattttaaaatatgagtttcacatgactaatggattcatattctactgtcaccatttattgcgagcttagccttagacctcagaacttttctctggttttagtgacagaatttgcttctctgttttcctagcctttacctattaatgaagctaatggaaaaatactttcctacaatgtttcgtgttcattgaacgaggagacacagtcagttttggagatcttcgatcctcaacacagagcagagatacagcttagtaaaaatgactacatcatcagtgtggtggcaagaaattctgctggctcatcaccaccttcgaaaatagctagtatggaaatcccaaatggtaagtgcttgggtggcatgggggatgtggggtgggatggaaaccctgtggtatcagctttcctgatgggaggagtatcctgcccctcctgtgctatttgcatgctgtgcatagaatttgcatgctatacatatatttacatgttatgcaaatagaggacccagtacttgaatgtctgctgcccaatgagagatgcagctagcattaatttttattttgtcttgagacaagattttgctatgtgattcagggtagcctcgaatacactagataaccaggctgtacttgaacaggcagtcttctgcctcagcctcccagatgtcctcaggattgacaggaaatctacagtgtgtagtaggtaataattactatattcaatttctttgtcgcagagtatgaaaagttctgggtgtggacggtactcttaggaagaaatgtttaaatgtttgtccgaagactaaaagtttctttttaagagtaagagttttagtgggtagtggtggtgcacgcctttaatcccagcactccggaggcagaggcaggtggatttctgagttcaaggccagccggtctacagagtagttccaggacagccagggctatacagagaaaccnnnnnnnnnnnnnnnnnnnnaaaaacaaaaacaaaaaaaaattaaataaataaataaataaaagtaagcgtttcggttgtcatctagttttgtaccctgtaggacaggggaaagaagacacctgtttcaattggcagctttgtggtgaattgattgcccccccccccccccccccgtgtatgttgtttgggttttgttgttgtggttgtttttagagaaggtctatatagtccaggttgccacgtggctaggaatgaccttgaactcctgattttccagcctccaaacccagcgtagaaattcttcatttaaaaagacccgtttctcaaagctaaattagatctttaataagggttttgatttgtttttgttttcgtttttttttgtttgtttgttttgtttgtttgtttttttggtttttggttttttgagacagggtttctctgtgtagccctggctgtcctgaactcactttgtagaccagggtggccttgaactcagaaatctgcctgcctctccacccccagccccccccccccaagtgctggaattaccaccacgcccggctaataagggttttgaaaaacaaaaatccttatgacatgattttacaatttttgtgtttttctctaaattgtgcaggttgccagccaatgacaaaccacattccttcttggcttttacatggacgttattagtctatattcattacacaaactagtgcatttgaactggatagttttacacagacatatataacacacttgatcatctttatcctcagatggccttcttttacccccacccccaactgcttagtctttcctcttctctcgtagctggattttgtgctgaatcaggagtttaaatggccattttgtgctcctcttccagttgcttccttagtatggaaagaactttttacaagaaaggaaaagtcttgttaggtctcttgagtgtctcttagtgttgtgttgaggtggtttcttatttcttggtactgacctggtttgtcagtcctaggcagtgaccacagagaactaagaagcaggaatgtagcagggttgtttcaaagactggatacgcccagatgtgtggccgtgcagagaagcaggggtcaaggccgggcgcctgtccagtggccctcatttgtacccagtgcttctgcagactgcagctcttttgttttctgtttaactggagcacactgatggtcgctgctcccagtggcccttgggaaggagagtcacagctgaaactgtggtttcagctccacagttgcacccgagcccagagtcagaggctccacagccccagctcaaggttagattatggctttgtaatcacattgagccaaaagagctgtcttacgtccaacaggtgctcagattgtgttcaggagggctgcgttatgaacatgcatttatttagaaatctttccgatatatggctttttttttcttttaaaccaaacccttaagtataaattaattgaagaagtcattcttctctcctgtccccatgggagactgcccttgtcttccttggccatgctgggctgtcctccactctggtccccatgcctcacctgcatcctcacctatctgtcaggcccaggtccagcagaacagacaagcaaacctcccacagccaagcagtgcctattctcactccccagggggtgcacctccaccccagtatctcatggtgtctgggaaatgcctctgcccacactgctcacctcacctcatggcatggccttgtcagcccttctgcattcccctcactcccccagcatttgggcgctggatgcaggggtcctggaaaggagatgctcagctcttcagttttggatgctccatctgcatgtgctctgcctctccctctctcaggagctctgctcaccttggatggggagagcaagagttagttgtcccctggttcttcctccacatagctatgctgaacactccagaaccagtctagatcctactatgtgtctaccagattctagaagcgtctatattttctcctcagcttctgaataaaggtagatgctatagttattccaataagagagtattatttctttgctaaacattgctacctagtttaaccactgttttaaagtttgtgtacagcgaaataacttcagtaactactgcccattttcttgaggcttgccttctggtattgctttgactgtcaataaaatatctttcttttcttgctgaagacgacatcacagtagagcaagcggtggggctaggaaacaggatcttcctcacctggcgtcacgaccccaacatgacttgtgactacgtaattaaatggtgcaactcatctcggtctgagccctgcctcctggactggagaaaggttccttcaaacagcacggagactgtcatagagtctggtaagaatccgtggctctctgaggcctttaaggggcttttgaaaagccacacagaggtgacttcctctctgtgtggtcatctactctgatagatcatcagagagagcagcatagatttgtatctgagtgtagggtttttgttgagataggtcctcaaactcagagatctgtctgcttcttctgcagaaatgaaaggtgtgtttccacacaccgggctctgaaatgctagggaatgtataagtggtggcattttgataaaataggcttcaatgggagtcaaagatgacacagtttgggaacgcacttctgtacaaccaagtcagtgcagtcaatgccctctcgcattagtgtgtccaggacttgggtccttgaggcctcaaagccaccaccaacagttccctaatatgaggaccagggaaactcaatggaagtgggcatgggatgtcttcagctttgcgatcgagcacaggtctgcccgtgagcctgtgagccttagcaagtgagccaccattgacggtgcagcctgacccatgtggcacccagtgaggtttggatcctcagagcaaccgtgtttctcctttggaagtggctgcttccctccctgcagggccgccatgccttctacagaatcagtgtgagcctacgcctttggggtttttcttgagccagtagtgggcctgtaggtcacgatacttctagagacatcagctactaggtcttccttctgtgttggtgaagcaagctggagggtaaagggccctcagtggcttccctcgctaagacaggttctggtcatttgctgtttctgctgttaaagggtgaaggattgcacttggcgattaaccacgatgggctcagctatctttccctctgtaagagcacttctgcagttgactaaggtggtggcggtcctctcttgccccctttctcctctggtcacctccatctttctcttccctacgcctactctcaagtcctttcctgtgggactgatttggctgagcctgtggtctctcccacttgggcttgcagaacaagtagggtgcccttggacagggcgacacaggcagtgtttctgggagaacaagttgtgactgagatccctcaggaaggggagaagctgctgtaatagctgccactgtgcgtgagcaggctctctgtggtagctgagaaaaacaaagacacagaggacttgggaaaggtcacagagttaggaggcagtggtgccagaattgaacgctactcggggcctgggaaagctggggatcttggtattccctgctgagcttctgtgctgatcccttcccttgttcatctctcgatgcagtcttcctctccttcagccctccgttctctctgcatcacccagcaggcccctttgtgacatactcgattcaatattgataatctgtaattttaacataaaacaaggtatgggttcacatgcaatataaaaccatagcctcgagtatatctcccctccccagcccccccagggaaggaaggcacaaaattgaatgcacttagctgagttggacttaccatcagtatttacttagtacctggaagcactgagtgaacactttagaaaaaatagtgtagggagaaaagttagctagcgacagaagctcgggtttcctttagacttctgaggctgaccatctatctcacttgggcctctggggttcaggtgttctttgggcgtgtggcttaaagaagcactgtattagccacacaggaatatgtcccatccagaaacagatgcctgctgcactgttagggcctcacgaaggccttgcctcctcctgctttctcctcctccgtcctcttagagagcacttggaggagctctttccaatcttagaactgatcagtacttctctttgtatccggtgcttactacccgagacccatggctgccctcgccccgtgtcttcccccaggcttggccagcttctccgggatgagaagggctcttcgtgtgtttccttgtttctcaagtcttgtcttacagatttgatgagacattaaaaggtgctttaggaattgaagaaagataatcatctagaagtggggatatggggggcacacaaggaagggggtggtaaaggactggagagtaaggacatccatatggagatgctatgataaaactcactactttgtgtgctaacctaaaaaagtaattaaaaaaaacttgagacacgtcttgtgtgtccgtcactcagtgtacattataaagggaagcaagcgatgaaggcctggttcctgtgtcccaaagctttgagctgagcagggtttctagtgctgggactaggggaaacatgcgtttctgtccatccccaaaatgatggcacatagatgagcgaaagcaccatgaccgtgctgaccacacggtggtgcctgggaagtaggaataagatgtcagcctcagctacctttgtctcttcaaagaaacgtcatcctgtgatcttttcattactatagacgtgaagatgttcgtggtttgctgagtactcctaaatgtttgccaaatttgaaaaaaaaaaacaatatatttttataatagatctgtagctagctttggaaattttagcatgttataaattttatgcttctaagataaatgttcttgctttacccacatagactgatgaaagtccactgatttgtttatcctacagatcagtttcagccaggagtaagatacaacttttacctctatgggtgcactaaccagggataccaactgttacgttccataattggatacgtagaagaactgggtaagttaaatgtctgagttctcttaaagtttggctaacacaagaccgtgtaaataggcaagtagcaggggtcacgctctagaacataccgaatttagttggttagatcaaagaagataaaataattcctatcacaaatttatcaaaattgttagtcacttgtctccacctgcttgttgatttcacagtttcagtcttgacactgaggaagttatatcatggctgtcgtacttgatttgtgtttacagaagcttaaaaacttggaaatgtatccaggcctaacaccagagaggggagtatccctgaagtctgtttgagcggtcacttaaaatatgcggcacatggggggctggagagatggcaccgactgctcttccagaggtcctgagttcaattcccagcaaccacatggtgactcacaaccatctgtaatggggtctggtgccctcttctggtgtgtctgaagagagcaatggtggcatactcatatgtataaaataaataaataaatctttttaaaaaaccatacatgcggcacaggttatcccctggatgcctgtctgtgtaaaggctgtgattcctccctgagctccgcctggttattagcgtagagttgttcaatcatcagaggaattcatgcttgagtaaaaagcacagcttaattccaagattaggtgtttctaaagccagaagtctcgggagcactcactcccctgcccttcagcccttgactgcttgttttgacagctcccattgtcgcgccaaatttcaccgtggaagatacgtcggcagactcgatattagtgaaatgggacgacatccccgtggaagagctccgaggcttcctaagagggtatttattttactttcagaaaggagagagagatacgcccaagacgaggagcttggagccacgtgagtaaatgaccgcctgggttctagtgctgtgtaaagacagacagacagacttccactggccacataagagcagaggggctgctgcacagctgagcacagtttccagaactatctcagagaatacaataaatagaacgtaaattctttcaaagtcaaaatcgcttatttagttagaatctttataagccccacagaatggtggccacttcttactagtgttacatgaaccacaccatatgatattatttattttttaatgtggttttatatctaataaccaaagaggcaaaaaatgggttcagagccccagttatgatctggaatcaaaatggtggcaaactgtagggttaatgggtcccaggacactctgggaggcaggatgatgcaggagttgaccacacttaccctatgctgtcacctgggtggccatggggaagccaatccgaggtcaccgctctggggctgggtaagcagagtatgaggtgtaggacatccagagctggctctggggtccctgggcctgcaaggagtctggagccaccaggttcccagtctctctgacacccaggtgccgctgggagccgtggaagacctgggcttggcttggcggtggcttggaggtgaccatggctaggagtgcagagaggccttctgcgggagattagacagaggctccataggtgaaggccatcaccgtgtctccccacagcggatcctgatggaaagaggcagtccacggttttaagacgtttattgtcatggctgaaagtggatgagtgaaaccatacccccttctcagggtgggcctgaggttaaataccttgggcagggaggagtatcagagttttcccttagtcacagacagggaagtgatttttatggagtgcctgctgtatgccaggcattgttctaacaaatgtacatgaaaattttacaggatgccacatcccctacagagtcagagaagccagagttgggagtagttagatggtttgactggtgggggaagaacttgaatgtggccccggagctttggttgggcgtgggcagcagcaaggtgttctccctcagggtctcatccccgagtttaaagtgacctcagggtgagtgagattatcctttgctttagatcattctgacatcaagctaaagaacatcactgacatatcccagaagacactgaggattgctgaccttcagggtaaaaccagttaccatctggtcctgcgagcctatacacatggtggtctgggcccagagaagagcatgtttgtggtgaccaaggaaaactgtaagttcaacacggccctagaaacacctttgccactggagcgatagtgtccttagcatctggggacatctttgttccaagctccaggcccgtgattctcaaccttcccagtgatgcacccctttaatacaggtcctcatgttgtggtgatcccccaaccacaaaatccttttcattgctacttcataactgtaatgttgctactgttatgaattgtaacgttaatattttgggagatagaagttggccagataggccgcaggccgcaggttgcggaccactgttgtaaggtttcacagttcattgcttttttatgtcaggaagagcggactgtcaaaggctatgagagaactttttttgtttttgctgtcaattatttccctataagtatgtaagaaattaatcaatttagggatgcaccccaaatctacaaccctaaatgcatagttgggattttttttaatgcagtttaaatattttccacactagtttgattttaataggtctagggaattgcgtaagagacagtcgctctctaaccttcagtaagaccacacttgttaagtctgagatggcagtagacaagggtggtagcctttgctgtccttcaccgggagaaagcttcagtttggcttcgggcttcccctccaccagaatggagtccttgtccaggtctggagcacagggccaagaggccgtgaggcattaaaacagtgttgcaactggacgtgatgctgccccatcgaagacaacttggcaatgtctggtgatgttcctgactgtcataactggagtgctgctggcatctcatggttagaaaccggatgtggctaagcctccacaccagagcgcacagggcagccctccctgcccctcctcacaccagagagagcttgcctatatgtcaccagtggcaggattgagtaatcatactccagtgttggtggccctagatcagttagagttttgtctcttcagataataaatgtcttgtggactccatacatccggtggtgattttcaatgttgataactgtttcttttcagctgtgggattgattattgccatcctcatcccagtggctgtggctgtcattgttggcgtggtaacgagcatcctttgctatcggaagcgagaatggtaatggttcctgtgtgtgtattcaccctcttgtttttacaagcctcattgtgcagtcatgttatgcatgtcggacattttttttttttaacttagaaggttgactttcaatatcaagtaagaaataacattttattgaaaatatttaagaactcaaagagtaaaagccgtcattctccctactgtctttactaataatttatcccagtaaatggcattttaaagaaagtggagccctttctgtgatgactgcagccattttgtcctgtcctagccaggacagttcctggcagtcaccccagagcccactgctctcctatgaacccctagccacactcacacctctacctctccccaccccacaccccttcaaagataaattgaccatggctatctgcaagtttatatccaagttaatgatctagatgggtcctaatggcctattagacctggtttttttgttcatatgtttatttcttatgaatgctccttccgtgagaaagaggttatagttgtgaataaagcaagcctggtccttgggagtctcccagcagagcgagagcaagagcgagcgagccagagagagagagcgagagagagagagagagagagagagagggcatgccagggaagcataaacatgcttacagggaaggaagaggaagcaggaaggctgccctggggagagccctggagggtaacagggcttcgggtagagaacgttctagagagagtggtttcaggtagactctgaaactggaggcactgtataattgggcaaagtgaggggggggggannnnnnnnnnnnnnnnnnnnacaggacaaactggctgcagtcatcacagaaagggctccactttctttaaaatgcccatcgtttaggacagttttgaagattcctggcttccaaatgaaaggagtaatacacaaatagaataacctatttcggcaactaattccaactttaaaacaatcatttcagtacacgaagaaaaaaagaggcccagaacctggaacattcagactcatgttaacacagtcaccgtccttgaggaatcccaaacaatagtgtccttagtacttctgagtataaaaatacagagtgttgaacaaatctttcctctgatgttgagtttctacctaagattgtagcttagctcaatccccccttcagctcagcaggccgtttccctgccattcatggctgcaaactctaatactttttgttattatttaacctgatatgatgactcatggctgcagttccagcacttgggggctgaggcagggagagtgagtgccataagtttaagggcagcctgggctaccatagcaagtctctacctctaaagaaaaatgaacaaaagtgcatgctctaacacacatacatgcatgcacatgcatgcgcgtgcacacacacgcacacacaaatgaaaatagaattgattgctttaatgtcaatgcctgtgcacttaccaaccttggtcgagcacttccatgcactggaagtgtcccttgtgcgggccagacccctgtgatgaccagagtactgcatgtgctcaccggcccttttgaccctgcttaatccggttcgtggtgaaaacttggctctacttcatgtgagacatgatggcagccgtcactgtaagttatttgctttcatttccttgagccaaataaggccttctagctagagcatagagtggtggttcacagcgttcacgccaaagccctgtgtctgcagctctggcgtaaagagcttctatttgtgtctcaggtgctcattgacattgtcacaagaaagcctcaagccaagctggctggtgcctacattttgttacacgatcactgcgtgatggtaattaaatcaaattcattctttatttgaaggattaaggaaacattctacccagatattcccaatccagaaaactgtaaggcgctacagtttcagaagagcgtctgcgaggtaatccgtccttctccgtggttgtctttggggacatggggccctttcctctgtctgttgtgagaagcttgggaggtgtggctgtccccgtggagaacagaacatgcatgtctaactctgtctgatgtccagaggtcttcgtcttcagcgttcacaccgtgcttcttctgctgctattaatagcaagaaaaatattgacaaggagggggggaaaaaagtagcttcgctctggatgtgaactctagagctgccgaggcaaaggtttataaacagatgtggaaaaaaaatatgaggggccccacaggagcgtgcaacgctgccgtcttaaccactgtaccaaatttatttccagggaagcaatgctcttaagacattggaaatgaacccctgtaccccgaacaacgttgaagtcctggaatctcggtcgatagtccctaaaatagaagatacagaaataatttccccagttgctgagcgtcctggggaaagatctgaggtggaccctgagaaccatgtggtcgtgtcttactgcccacccatcatcgaggaggaaataacgaaccccgcggccgatgaagtgggaggggcttcccaggtcgtgtacatcgatgtgcagtccatgtatcagccgcaagccaaagcagaggaagagcaggacgtggatcctgtggtggtggcaggctataagccacagatgcgccttcccatcagccccgctgtggaagacacagcagcagaagatgaagagggtaagaccgccggttacagacctcaggccaatgtaaacacttggaatttggtctctccagattccccgaggtccacagacagcaacaacgaagttgtctcttttggaagtccgtgctccatcaattccaggcaattcttgattcctcctaaagacgaagactctcctaaatctaatggaggagggtggtcctttacaaacttcttccagaacaaaccaaatgactaaccaggtcaccctttgtcacttcagtctgccatctcagtaagtcctccctgccgctgtcctggcagcagctggggcatttctggagggaccctgcaaatgttgatagccagggaccttcactctgggcaagtgacactagaagtgttaatgtgcttttaatgtatcctaaaagccagagtgcagtgactcagccctcagccgcggaaactcaagagttgaagctgtttttgattgagccaaagaaccctcccaaaggacctcaagactaaccaactctgtgtagtacatacatgctaaccagatctcacaaccgttttctgttgttaatggctttctcagcgttgtatggtatgggattgctagtggatttacaggcaagggagaaaaccttcccaagtcaaacagcgttaatttgcctgacatttactgcggtctagaggagaaccaagcacagatcttaaagccgtggtgatgtctctgtccacagcatttacaaaagcaaatctagtttttcatgtagcagcagctatctggcgttctgtttgataaagcgtgctgatttctgtgcctactgt

SEQ ID NO: 112 - DNA, 3924 bp, Mus musculus
agcaagccagtaagcagcacccctccgtggcattggctcctgcccaggggctgactgaacagcaaggacaatggcagcttactcatggtggagacagccatcgtggatggtagacaataaaagatcgaggatgactccaaacctgccatggctcctgtcagctctgaccctcctgcatctgacgatgcatgcaaacggtctgaagagaggggtacaagacttgaaatgcacaaccaacaacatgcgagtgtgggactgcacgtggccagctcccctcggggtcagccctggaactgttaaagatatttgcattaaagacaggttccattcttgtcacccattagagacaacaaacgttaaaattccagctctttcacctggtgatcacgaagtcacaataaattatctaaatggctttcagagtaaattcacgttgaatgaaaaagatgtctctttaattccagagactcccgagatcctggatttgtctgctgacttcttcacctcctccttactactgaagtggaacgacagagggtctgctctgcctcacccctccaatgccacctgggagattaaggttctacagaatccaaggacggaaccagtagcactcgtgttactcaacacaatgctgagtggtaaagataccgttcagcactggaactggacctcagacctgcccttgcaatgtgccactcactcggtgagcattcgatggcacattgactcgcctcatttctccggttacaaagagtggagtgactggagcccgctgaagaacatctcctggattcgtaatacagagactaatgtttttcctcaagacaaagtggtgctcgcaggctcaaacatgacaatttgttgtatgagtccaacgaaagtgctttcaggacagatcggcaatacccttcgtcctctcatccatctgtacgggcaaaccgttgcgatccatatcctgaacatccccgtttctgaaaacagtggcacaaacatcattttcatcacagacgacgatgtgtacggaacggtggtctttgcaggctatcctcccgatgttcctcagaagctgagctgtgagacacatgacttaaaagagattatatgtagctggaatccaggaaggataactggactggtgggcccacgaaatacagaatacaccctgtttgaaagcatttcaggaaaatcggcagtatttcacaggattgaaggacttacaaacgagacctaccggttaggcgtgcaaatgcatcccggccaagaaatccataacttcaccctgactggtcgcaatccactggggcaggcacagtcagcagtggtcatcaatgtgactgagagagttgctcctcatgatccgacttcgttgaaagtgaaggacatcaattcaacagttgttacattttcttggtatttaccaggaaattttacaaagattaatcttttatgtcaaattgaaatttgtaaagctaattccaagaaagaagtgaggaatgccacaatcagaggagccgaggattcaacttaccatgttgctgtagacaaattaaatccatacactgcatacactttccgggttcgttgttcttccaagactttctggaagtggagcaggtggagtgatgagaagcgacatctaaccacagaagccactccttcaaagggaccagacacttggagagagtggagttctgatggaaaaaatctaatcgtctactggaagcctttacctattaatgaagctaatggaaaaatactttcctacaatgtttcgtgttcattgaacgaggagacacagtcagttttggagatcttcgatcctcaacacagagcagagatacagcttagtaaaaatgactacatcatcagtgtggtggcaagaaattctgctggctcatcaccaccttcgaaaatagctagtatggaaatcccaaatgacgacatcacagtagagcaagcggtggggctaggaaacaggatcttcctcacctggcgtcacgaccccaacatgacttgtgactacgtaattaaatggtgcaactcatctcggtctgagccctgcctcctggactggagaaaggttccttcaaacagcacggagactgtcatagagtctgatcagtttcagccaggagtaagatacaacttttacctctatgggtgcactaaccagggataccaactgttacgttccataattggatacgtagaagaactggctcccattgtcgcgccaaatttcaccgtggaagatacgtcggcagactcgatattagtgaaatgggacgacatccccgtggaagagctccgaggcttcctaagagggtatttattttactttcagaaaggagagagagatacgcccaagacgaggagcttggagccacatcattctgacatcaagctaaagaacatcactgacatatcccagaagacactgaggattgctgaccttcagggtaaaaccagttaccatctggtcctgcgagcctatacacatggtggtctgggcccagagaagagcatgtttgtggtgaccaaggaaaactctgtgggattgattattgccatcctcatcccagtggctgtggctgtcattgttggcgtggtaacgagcatcctttgctatcggaagcgagaatggattaaggaaacattctacccagatattcccaatccagaaaactgtaaggcgctacagtttcagaagagcgtctgcgagggaagcaatgctcttaagacattggaaatgaacccctgtaccccgaacaacgttgaagtcctggaatctcggtcgatagtccctaaaatagaagatacagaaataatttccccagttgctgagcgtcctggggaaagatctgaggtggaccctgagaaccatgtggtcgtgtcttactgcccacccatcatcgaggaggaaataacgaaccccgcggccgatgaagtgggaggggcttcccaggtcgtgtacatcgatgtgcagtccatgtatcagccgcaagccaaagcagaggaagagcaggacgtggatcctgtggtggtggcaggctataagccacagatgcgccttcccatcagccccgctgtggaagacacagcagcagaagatgaagagggtaagaccgccggttacagacctcaggccaatgtaaacacttggaatttggtctctccagattccccgaggtccacagacagcaacaacgaagttgtctcttttggaagtccgtgctccatcaattccaggcaattcttgattcctcctaaagacgaagactctcctaaatctaatggaggagggtggtcctttacaaacttcttccagaacaaaccaaatgactaaccaggtcaccctttgtcacttcagtctgccatctcagtaagtcctccctgccgctgtcctggcagcagctggggcatttctggagggaccctgcaaatgttgatagccagggaccttcactctgggcaagtgacactagaagtgttaatgtgcttttaatgtatcctaaaagccagagtgcagtgactcagccctcagccgcggaaactcaagagttgaagctgtttttgattgagccaaagaaccctcccaaaggacctcaagactaaccaactctgtgtagtacatacatgctaaccagatctcacaaccgttttctgttgttaatggctttctcagcgttgtatggtatgggattgctagtggatttacaggcaagggagaaaaccttcccaagtcaaacagcgttaatttgcctgacatttactgcggtctagaggagaaccaagcacagatcttaaagccgtggtgatgtctctgtccacagcatttacaaaagcaaatctagtttttcatgtagcagcagctatctggcgttctgtttgataaagcgtgctgatttctgtgcctactgt

SEQ ID NO: 113 - protein, 1088 aa, Mus musculus
MAAYSWWRQPSWMVDNKRSRMTPNLPWLLSALTLLHLTMHANGLKRGVQDLKCTTNNMRVWDCTWPAPLGVSPGTVKDICIKDRFHSCHPLETTNVKIPALSPGDHEVTINYLNGFQSKFTLNEKDVSLIPETPEILDLSADFFTSSLLLKWNDRGSALPHPSNATWEIKVLQNPRTEPVVLLNTMLSGKDTVQHWNWTSDLPLQCATHSVSIRWHIDSPHFSGYKEWSDWSPLKNISWIRNTETNVFPQDKVVLAGSNMTICCMSPTKVLSGQIGNTLRPLIHLYGQTVAIHILNIPVSENSGTNIIFITDDDVYGTVVFAGYPPDVPQKLSCETHDLKEIICSWNPGRITGLVGPRNTEYTLFESISGKSAVFHRIEGLTNEYLGVQMHPGQEIHNFTLTGRNPLGQAQSAVVINVTERVAPHDPTSLKVKDINSTVVTFSWYLPGNFTKINLLCQIEICKANSKKEVRNATIRGAEDSTYHVAVDKLNPYTAYTFRVRCSSKTFWKWSRWSDEKRHLTTEATPSKGPDTWREWSSDGKNLIVYWKPLPINEANGKILSYNVSCSLNEETQSVLEIFDPQHRAEIQLSKNDYIISVVARNSAGSSPPSKIASMEIPNDDITVEQAVGLGNRIFLTWRHDPNMTCDYVIKWCNSSRSEPCLLDWRKVPSNSTETVIESDQFQPGVRYNFYLYGCTNQGYQLLRSIIGYVEELAPIVAPNFTVEDTSADSILVKWDDIPVEELRGFLRGYLFYFQKGERDTPKTRSLEPHHSDIKLKNITDISQKTLRIADLQGKTSYHLVLRAYTHGGLGPEKSMFVVTKENSVGLIIAILIPVAVAVIVGVVTSILCYRKREWIKETFYPDIPNPENCKALQFQKSVCEGSNALKTLEMNPCTPNNVEVLESRSIVPKIEDTEIISPVAERPGERSEVDPENHVVVSYCPPIIEEEITNPAADEVGGASQVVYIDVQSMYQPQAKAEEEQDVDPVVVAGYKPQMRLPISPAVEDTAAEDEEGKTAGYRPQANVNTWNLVSPDSPRSTDSNNEVVSFGSPCSINSRQFLIPPKDEDSPKSNGGGWSFTNFFQNKPND

SEQ ID NO: 114 - DNA, 115611 bp, Homo sapiens
ctctctcccagaacgtgtctctgctgcaaggcaccgggccctttcgctctgcagaactgcacttgcaagaccattatcaactcctaatcccagctcagaaagggagcctctgcgactcattcatcgccctccaggtacagcactgctggggtttgcttccttccttcctggctttgtgtcccatgtccccttagacctgtcccccctttagatttcttttcactctgctttaataccagttgtgagggtctctcagggctctgaccttacctctttgtcctacaaaagtgtatttcttgtgtggtttcctgtgacctgtacttacccagactttctccagtcaatccttggcatcctacagagatggtcttcctcagtcttcagtctctgtaacgataccagcccttgtttagagacccagagtagaaatggtcactgtatacagttgtacagtttctgcaccgcacagacacctgaggaagagagcaagtggttaggaaaatccagcttgcacactgctcaccaagatgaatgcctgaagctgctctgtggaaacctagaggaaggtacattgtttcgctttttttccatgtcagatattgatagaatcacatataactacattagattatcagctaaaaccagattagtgtgttttattgtcatgtcattgtgtatgtgaacatgaagacttttagagtgcctgaaaatattttatgagaaatagttaaatagcttccctttttatttttcattactagaccttatttcttagagcagttttaggtttataaaaagccagagcacaaagtacagagagcttcatatacccctgcccaccctgtccaccccactcccagtctcccctgttagtaacatcttatgttagtgtggtacatttgttgcaattgatgaatcaatattaatagattagtatgaaccaaagttcatggtatacattactatgtatactatgtatactcttcgtgttgtgcattctatgggttttgacaaacgtgtgatgacatatatgcaccgttatagtatcttacaatagcttcattgctattgctaaaactctgctgtgctccatctgttcatccttcttttcttccctgccttctccaggccctgacaaccactgatcttttaaccatctccatcgttttgaggaaagtacacttttttctttgcacaaagaactgtctactagccaaaaccacaggatgcttctgcccagaggaacaccatttaaaaaaacatgcgcaaaggttttatcgcagccagccaatgccttgaatccaagctctaacccaattcaagacctttccctggatcacgtccgtgtgtcctgtctctcttgtttccccttatccatctagcatatacttttcctggtaaacgtttctatttttttctgtttaggctgctgtaacaaaaatacgatagtctgggtagcttaaacaaaaatcatttatttctcacagatctgtaggctggtaattcccagatcaaggcaccaggcagaatcagagcctggtgagcacccacttcctcgttcttagaggaccgttttcttatcatgtcttcacatagcaaaagggacaagggagctgtctggggtcccttttataagggcactaatctcactcatgaggcctctaccctcacaatctaatcacttccccaaggccccacctgctaatgccatcacattaagggttaggattttaacatatgaatttgggggagacataaacattcattctgttgcaattaccttatgtgcccctctcatctacccacccatctatccccctcctcttctctgatgcatcttctatgtcagccctgtctgaaagcattttctgcaatgatgagaatattctacacctgtgtggtccaatataatagccactagctgcatgtggctattgagcacttgaaatgtgtctcatgtgacagaactgaatttttaagttacatttcatttgaataatttaaacttaactccatgtggcaagcaacaattgtattagacagcataggtttaagtttttacctatgccagattccccattctaacagaattcattaacatcccccccagtttcatactggacatcttcccctcccctgccttttttatgttttttgtttgtttgttttgttttgttttgttttttggttttgagacagagtctagctctgtcacccaggctggagtgcagtggctcgacctcggctcaccgcaacctccgcctcctgggttcaagggattctcccgcctcagcctcctgagtagctgggattacaggcgtgcaccaccatgcctggctaatttttgtaattttagtagagacagggtttgaccatgttggtcaggctggtcttgaactcctggcctcgtgatctatccgcctcggtctcccaaagtgctgggattacaggcgtgagccaccacgcccagctgctccttctccttgattctttcctggctaatcaggaaagatacaattgttcctgaccccattgctgaaatagtcagctactatgtccgtcacatttattaccattaaatttgcaaatatatgtacaaccattatatatccatacaaactaaaaatagttttaaaagtattagtttaatttaattaaactattagttttttctaaaaaaatagaaaaaatgtgcacatatggtgccgtctcacgtaactttttttttttttttttttgagacggagtctcgctctgtcgcccaggctggagcgcagtggcgcaatctcagctcgctgcaatctccacctcccaggttcaagcatttcttgtgcctcagcctcctgagtagctgagattacaggcatgtgccaccacacctggctaattttttgtttttagtagagacagggttttgtcatgttggccaggctggtctcaaactcctggcctcagctgatctgcccacctcaggctcccaaagtgctaggattacaggcgtgagccactgtgcccagccttacataatgtacttaaaatttctttaatttatgaagctagttgatgttgcttgtctataccttttaattctttcctctttttttttcttaaagaaatttccaatttctttaaaattttctgtttaaaactctatactcccagaaaacagagtagagttacataactaatgctttatttggcaaaaactacaaggccatagttagtgggctaatatatgtcagttcagatgattgtggcaccacctttaaggcatgaaaaggagagaagggaagaaataataacaccaaaagaaattaagagtttaagtccaagagtcagcatggagtggagttaaggaactatggattgtggttcttgggaggctggagttagtggtaagcatgtctgtgccaccaaccagtccagggcattggtgatatcactgaatctctcagagactcagctctctgcttcacagcatgcaggttttcactagaccctccaatttaaggtgtcttctagatcaaaatgctctttaggtcaaacacagtcttaggaataactaggaaagttgaaacaaactttcgtcacacagactgtttcacattatcccacctcctgtcacccccttctcccacctagcaatgtttgtgacgaatacaccaactttcctgaggacaagagcaaaacaatattttaagaaacaacaaaactcagtttagagtgagtcactgggcctgaccatggtggctaaactgaccacaaaagtttgtgaatagtctatatggtgtccttcaaacatctgcacaaaccttttatttccagtgctttgaacagaaataaacatagtcattaagccaaattctacattctacaaaacagatgaaaagttaaagcataacgttaagtccaaaacattagtgtggagtcctcagctgaatacctcttgcctgcatgcccatgtgagcagtcagttaaatgcctggtgtctgttatatgagcagtgggaaatctttgcatacaaaaaagtgtgagttgtactaaagtaaaatcagtattctggatcccttaatgtgcacataattaccacttaggcttctaagcgaaatgatttgctaatggcaactaaaatgtgacatggcccagagtgaaaaaattgattcataacttgggaaggtttgactagattgcccttaggcaagtgcctagagggctttcctgtctctccctaaaccttgcttctgctgttccaatgtacaaaatagggatagggttgttgtgaagattaaatgaaactagggcaggtcttctggacagatactattacagtgctgcaagcccttccttcagaatccttggcaccattacagttctacatttatttatatcatcatttgactactgtccctcagctgactgtacattccataaggacaggatttatgtcaactttttctcaacattgcttcaccacctcctcatagaacctggcatataaaagggagtcaacaacaatcttttgaatgaaatgtgtaagtcatttgcagtcactggtgtcagatccccgggtttgaatgctgtgtgcttggacaagtaatgtttctgcctttgtcttagttcctgctttctataaaggggagataataatggtatctacttgactgaatagttgtacaaatttagtgggataatacttgcaaagagcttggaacagtgtctggtacatagtgaggactcaatacatgctaatgaattttgatgatgatgatggtggcggtggacatgcaataagctcttcataaataatagctcttcttctaattgttattcacggtcatcattgaaacagtatttgcctcttgattatcagtcataggtggtccttagttacctaaaatatcacaggaccactgctttacctttccatgttatgccaggcacagacgacagaggcagtgtcaaaggagatacccaaatgatgtttacaatggtacacgggtctctagggtccaaggaaaagttaccaagtattttcccacctccctactttcatctccctcttacttcccagtcccttccccccatgcttgtatggtcttctggctttttgaccagtcctccctggggattttcaagtacccagcttgcaaatcagcctccccagaggatctgtctctactcatcatagtcaaaggatgtaatctgttctcatgtggaaataatttgttcagagaatgtaaatgatcaaagcctatatttctgtattcaggagaggaagagaaaataatagaaaagacttgaggctaactctaggtcctgcatttactaagtcacctctgataaattacttggtaaattatgtcttagaaaaaccattggtttggtaggaataatcaaaatgggatccgtgtcccgggtttgtaagaattaaatgagttaactacatagatggtttggttccaattagataagagagtttctaaacagtgaaaagtagaaattttgccacaccctgccctcacaattctagcatttccaggtttccaaatctgggaaatgtagctaagggcttttcctttctctagggactccctttacaagtggtggagctactttctgctcgaggacaaagaaggagggaggacacacacacacacacacacacacacacacacacattttcttctctgccttctgaccctttgctattgcaactctaatttgggaattaaattttaataattctaaaatcccatttccgtactttccatatactattatttaatggaataaggttatcaaatcttatccttaacccttttcccatttttttaaatttgatggtactagatttgaattttatagcattttcaagaatcacttgggattaatttgggattcaatttcacttgagaactagctgttgtaaagttgaattatttttaataagcaaaattactttcatccattttatttttttaatagttaaggaacattcactttgatattcatagtcctctaaagtataacataagcattactatttcttgtttaaacatgatcagtagctaagttgtaaaaaaacatggggaaaggagttagccctacacttaaaggaggcagtatcccaaagaatatgatttttaaaatgagatcagtaacatagagctcttcatcctggctaacacagtgaaacaccatctctactaaaaatacaaaaaaaaaataaaaattagctgggcgtggtggcaggagcctgtagtcccagctagttgggaggctgaggcaggagaatggcatgaacccaggaggccaagctagcagtgagccaagatcgcgccactgcacttcagcctcggcaacagagtgagactccatctcaaaaaaaaaaaaaaaagaaataacatagagctcttcaaagtagaagtacaataaataccaataaacatatgcataattggatctactttatttttatgggtaaaatgtataaatgcattgctaacctatagatagatgatttggggaaataatgaaaagctcagagtgtttcatacactttctagagtaattccagttctaaagaaaaatttccaggcaaattctcaagttcagatcgtaatgtgccttttatcctattaggggtcatttctttcctgagcattgtaaggacaatatctgagatgtgcttgattaatccatagggatttaaggccttttgaaaaagacattcaaagacctaagcaaatataccttctgatttttataaatattttattctttacttatttgtctgagcaaaattgcataacttactagcaactccaaccacatgtaacatttaacttaaaaaacaagtagggaagaaaaatgaggtttagttaaaattgaaaattaatttcttttctctgtaatactgacttctgtgaggatttttaacaatgaggtcaataaaagtatttaaagccacggggaatgattagacagtctcatcatcctgcatacagtgtccttcatattaaaattcttcctcaagccctttcttctccccttccttccttttcagactgagcacctgatcagagaaaacctgcttgactgtgtagccctgagagtttggtttcccagaggacagttctaggcctctcaacctagaactttccacctgtgtgaccttgggctagtggcttaaccttcagaacctcagtctactcatctgcaactgggtatccatgtcacatgttaatgttggcattatattgaatattggggattttgctaatgagagaatggtttccctcacaacctccaattgcagctaacttatgctttgatataatgttgctctaggtcaaaaataaaacaggccttgtgatatgtattaatggatagagtcagaaatacagattccaaattctacagtagcaactgagaaggaacagaaggcagggcatatctccaggccagggcctttgaatccctacacctaatgtaggcccaggcacatggtaagcactagatacatgtgcttttgaagggtcttttgatggattttgataagttgccccgactagaatgaagctggtaaaactagaaggcaatagagattcatgggttaggagcaaaaggtgggaatctagcccgctgggttcaaactccagctttaaagtgactttgggcaatgttatttctcagattctgggtttaaatctgatcattcttctccctatttgtcccccatcccgtacactcttttaaaacagtaacaaccaccaccaccaccatctttaatagcttttcactgcctttaggataaagttccaaatgtggcccacagcatctggtccctgcctatctcaccagtcttctcttgctagttctgttagctcaagcaatagtggccttttttttttttcagtccttcggaagtgctacctgactctttcttgctcctgggccgtcttgtccaacagcatcttgtctcatctgcctggagtgattttcacctccagcaccagtaacgcctccctgtttgccggaataacttttaatgtccaggcttaaacatcttttttatccgtgaggtttttcttcccatccctgtctaggttaggacccctggtatatgctcctcagtttccctctttcttgacactcactgcattgggatgtctgttccccattagactccatgggatgtttgtgtgtttgtagagggctggggtggggaggggtaaggggcaggaggtctacttttttcagtactgtattcccagggtgtagtcctgtggctgttcataaaactctccaaatggatgagtgaaggatttaatatcgagagaccaacatcagtctaccttatagactggtgaagggtaatgtagatcagcacaattcttggcacacagtgtctcagtcaatggtggctattattaataacacaaatgcttaattgatggatttctttcatttctaaattctttggtggacacttttccaaaaaggagagttaaaggaagatatgcaagctgccattttgcacccattcatctgaaaactatttgagagttttaaagcagaacgagttgaaacaatgtgccagacctaaaattggaagcaacacagaaaatggctttgatgtgatggatctagtataattgtgtgtttgcaagggcctcgggtctggctacactccaggtgtaagcatccctaacccagtctatcaatcagatgttaccagtttgaacgtttctgttgttttttaaacagaaatatgagtggtgcctataggaatctacatgttagcacttggaaaatgactacagtgagtatcacataaaaacaaaatttgcaaaagataattatggaatccacatgaaagtcttacatctgaggcttctacatgaataatgaaaggtgaacactctaactacagttagaattctgaggtaggattttcataatgaggaccatgttatgtacagcttggtgtaacagacttgtatcttcttttatttaaacattataagtgtgagacttcttttatttccaactgaccaggtctcttaagttataaactttgctgaaaatttaacataggtaggacagtttgtcataattcttagcactggaagaaactgtgagttaaaggaacgaggccataatgttgctatgtcatgggtcagagccgatgttttaaaatgggggcttttcattgacacccgggtgacaagagtgaaactctgtctcaacaaaaagaaagaaaagaaaaaaggaaaccaaaagcttttaccagaaccccaggcaaatatctacttatgtctcagtggctggggaagtggggaaaaggggaagcggataccggataagtaaccaaaagtgatgctacactcggcttagttgcttcctattagcccagttgcagatgggaaacagaaggggattgactgctctgggtcatcaatcatgctctcttggtggggagtggatgaagaagagaagatgtgacaggtcatttctggcaacttccaagtctataatagcctagctagcaagggaacttacggacaatattttgccattgacttatattttttaaaattattatgttatttagagtaaagtagatagccatatgagctgacctagatgctttcctccatgaaaaaaaaaatgagcaactaggttaccatttacaatggttcatatgtgactctgaatgactgtgtgtccctctattttagaaatatctgggccttcctgatgtccaggttgacacacatcctgttttgccaagttggaaagagttctgaaaatcccattccattttatttgaagaaactaccacagcatttcttcttctaaccctaatgggaagcacatggagatcattgaacgttgggagcccttttatgcccaaattatgttttttaagcaaagagctatgttaaagcgacctccaaacatgaccctggcaaaagtcagtagccttgcttgttctggccaggttcctgatgtaacccaaggttctgggaagattcactttaattacaaccccttttgatctgttcctcatggtctcttacataacatgtattacagttactaaaactgaaattttcatctttgagctaattaaatggatgtaatttgtacttgacttcttttcttttagaagagctggttaagtcagtatgttgtactgtttttctaaagcacgcaacttaaattctctttatttctttaatttttgatttaagtaaaactttagcttttgtattctattacaaagataataaaaacacttatggcatcatctaatttttctttagccatcatacaatatcctatgaagaatatttctttggaaagcattttcttcttttttaaaaagtaaattttactgtgtatatttgaggcttacaacatgatgtgatgagatgcatgtattaatagatagtaaaacggttgctataatgaagcaaattcacgcatctatcctctcacatagtcacttttgtgtgtgtgtgtgacaaaagctgctgaactctacttatttaacaaaaatccctaatgcaatacaattttactacctatagtccccattttttacatgagatctctaggtgtgttcatcctacttatctgctactttttatcctttgacctacatctccctattttctccccactgacccataaccactgtttcattctccttgtctatttgattttctgttttaagattccacatataagttaggtcttgcactattttttttttctgtgtctggcttactcacggagcatagtgtacaggtccatttatgttgtggcaagcattaggatctctttcttttttaaggctaaataatattccagtgtgtgtgtttgtgtatgtgtgtatatgcatatataccacattttctttatccattcatttgttgacacttaggttgtttccatgtcttggctatggaacagtaccacaatgaacatgagagtgcaggtatctttatgagtgggtgatttcatctttgtgtgtatacccagaagagggattgctgggtcatatggtagttccatttttaaatttctttaggagcctccatactgttttccctcatggctgtatcaatctaaattcccaccaacattgtacaagcattctcttttctctaccatctcaccaatatttgttatttcttgacttttcaataatagtcctattatcaaaagggtgtgaaatggtatctaatgagtatgagatggtgtctcacagtggctttaatttgcatctccatggttgtattaatccattttcatgctgctgataaagacatacccgagactgggtaattaattaaaaaaaaaagagagagatttaatggactcacagttccacatggctggggaggcctcacatggtgaaaggcaaaagttacatcttacatggcagcaggcaagacagaatgagagccaatggaaaagggaaaccccttataaagccatcagatgtcatgagacttattcactaccatgagaacaatatgggggaaaccaaccccatgattcaattatctcccactggatccctcccacaacacataggaattatgggagtcacaattcaagatgagatttgggtggggacacagtcaaaccatatcaatggtgtttagtgatgttgagtacccttttcatatacctgttgatcattttatgtcttctctggagaaatgtctgtttagcttctttacccctttttaaatcaggttatttatttttctgctattgagttataaatgttctttataaattttgggtattaaccccttatcagatacgtgttttgcaagtactttttcccagtctgtaggttgccttttctttttgttgactgtttcctttgcagtgcagaagctttatagtttgttgtagtctcatttatttatttttgcttttttagcctgaacttttggtgtcagtgttttcttaatacactaataagttctcatgagaattggttcgtttccaaaaagccttgcatggtgcttatatatgaaagtgaaaatctacattacttaacataaagcatatgattaatactagaaacactccattctccatgtatcatgaaaatattagcatatgttagaatgcaagatcaaaaaagtgttataagttgtaccatattactgatcatgaaatttataactcataattttggccttcagttcaacagcagctctacgtaacaagcaagcatcaattgaacacgttacgtatgtgcaaggcactctgctctgagtatagggaggaattagcatactgcagtgcctgttctcaaacgactcttattccatcaagaggaaacagacaaataaacaaataattacaatgcaatgcgatcaaacacaatgataaaaagttacacagagaccggatttaactctgttggaggacggtgaagatagggcgtcagagaggtttcagaaggaaggcaatgcctgatgaatagcttcttgattgaagggtgctgaggaagtggcagcagggaattccctgggcagaaggaaaccaagtaagcattgtgataaaagtgcagattaacagtgatgagaaccgaaactaagacagtgccagtgaaatgctggcaggggatgaatctgcagtactttggaggtaacactgaaaacctagcaatttgatttagtattgtccaaaaaggttactaaagatgaagcttactggtggttcatggagataattttgctggccttgtctttttaatagatcacttgatgtgaagcaaagttttaacaaacactatatgtgcataatttattttaatttgaatattatatatatataaatgcccaaggctgtttgcataaatagcatatctctaaggtatttgttcttgcatagcaacagactgagggcaaaataagaaaacgatgtaagtatttagtgaacatggagaaaaaaccaaactgagtctcactgatccttccaactcctttctgcctgattgaaggatttacttggtcacctacctctgcatattagttcccaatcctgtctaataaattgccaagcaacaaactgcctgatttattcattctgtcagtatgttctgagatgcttggaactggagacagagaaatcaagaaaaggctgtagccaggcatggtgtcacgtgctacttgggaggctgaggagcagggatcacttgagcccaggagttcgaggctgcagtgatctatgatcatgagactgcacttcagcctgggcaacagagaggacaccatctctaaaaaaagaaaaaaaaaaaaggaaaaaaaaagaagtggtcatttgtccagtgtaataagcacattcttagaagtgaggcttgcaagaatgcggagaagtgagctaactctacctggtggcaaaagaaacgcttcacaaaggaagtgataatgcagctttgaaggtttgaagaatggggaaaaggaggaatgtgtggtggcatttcaaatataggatactgtgcgagatcacattattgtttccaattacttgttccatctccctgtgacaggtttatatttccctgccccatttaaggtcaattttggccatgtgacttgctcagctcaataaaatgtgaacagaagtgatttgtgtcacttatgagcaaaattcatcgtgacattccagtattactcttctccctctgacatgtgagaaaaccatttccagaaaggacctgctcatttcacttcagtcccagaaaaaagaagactcttggaataaagctgaggccaacctgcagccaatgtgtaatatacaagcaagaaatagaccttgctgttgaaaacctccaagacatgggatgctggttacagcagcgtaccttaggaaagctgattaacacaaaaatagtcactgaaaaggcacaggactatgaaagggcatggagtggttgcggaatggtgagaagttcagattggctgagagtgtagactccgcgtttagagaaagacagccagaaatactccagaaaggtagcctgggaacagattttcaaagggtcttaaacgtcctgctaggaaagttgagttttagtctttaaatagtagaaagccagcagaagctaaggagtgacctgataagtttttttttttcttagaaagatgattctaataggaggggaatgatgctagtaccagggaaatcagctaaagcgtttttataatcctaaccaccactatttattgtgcacataccatgtgtgaggcattttgcacctatttaccaaagtaatacaaccaccccctggggtagacattgtaatgatcctttttttatagatgaggaaactgaggcacagagaggttgaataacttggctaagtcactccaaagacattgtagcattagagttccatcccaagcagtctgggtgccagaatccatatcccactctcagaagcctagaaagtggtaataagcatctgaagcacacggagatagagaagaacatctcgagtctcatatttatggggctgcagaggctgaaggtgggcatgaggtgaagcttaggggtgacagagatggaggagccacagataatgcctcattctttactgaagaggctcaattggtgctgaagcaatgaattggaacgagggaaaaaaagagcaggtttaggaaaggaaaatgacgagttttgcttgggatacattaattttgaggcagatgtgaggttaggtggagatgacctactggcagttagaatacgggaccgaagctaggagcaatgtggggtggagacagatctaggtggggcagaaggccaggtagcagattaattcaccctggcagatgtagaaagtgacttgaaaagagtgtcaagggaagaatttggaggaaccccatgatttaaggagtagatctaggaggaagagccagagaaactttgactgggaggcagtgataagggaaaggaaggtggcagggagagaagagaggatgggttttcaaaatgatgatcaccacaatgacttaaaactggaggaattaggaggcaaccacagccacctctgtttgtggcacactccagccatagtgactttgagaaacaagaacctccacttccacagcagcataaatcacattgcaccttatgagtatcccagtggaggaggtacaaggatgcatttgggtggaggtggagaaaaagtagaaaatgagcttccctgatgatgactctcatagaattaagtacttttatactaatttataactgcagaacttatttatgaacttctaaaatgacagattcccataaatggggaaaaaagtgcattgcttcaatttacaggaattgcctaattccaaacatagtaatgagaaggatttaaaattaaaatccttttgggaacactcttctacctggaagagctagcttattagagtcacctcttatgtgttctccattaacactattaaatttcaacagcctgtaactgttgaatattaagatatttgcatagaattccccaggtttttggatgacctagtagaatatcacatttttaaaaacacacgaatagctcaaagctacacagagtttattatgcaacattctattaggaatagctcaaatgaatgctttatagtagaagaaagtgttgcagtattttgtctataacataattgactttcttggtgagtatacctcaaattattgaggtatgttgagatggtgtttggaaaatgttccatggaaacaaagcttggaaacttggggttaaacaatcttgattttatttttctattgcaggacttctgagagccttcggtgtgctggtttacattgcatagctctagagatgggtattatgtaggagttcctaaacttaactgaccatacatagactcccctcttttttttttccaaaaatatttgacctactttatgaaatgtcctatatagcagattatatttctgttcaaaatgttggctgctcctccctgtggtatcccttttctgtagaaatattatccttctctacttcactggccccaagtgtggccacgtgacctgttttggccaatgtaacatggctgtgggtaaggtgtgtttcttctatcagacactcgaagagccaggtgtagttcatctattctttgtatcctttgctacaagaccagctatgtcccaaagtttgttctgacatcttagagttctggagagtcctagaatggaaatgtaaatgcataaaacataagtctttgaaattgtaagccattaatattttgcatcatttgttaccacagccaactgagcctaaggtgactaatgccttctacttctaagtatttctaaattatctgaacctttaccacttttcacaggtgtactcattctgtattgattgtctaaatgaggaagtgttcttggaattattctttaggttaggacagtacacttgaaggtgaactaaaaaaaatatatatgaaacgtgtcttaaagaaatggtgtctaggctgcgcgtggtggctcacgcctgtaatcccagcactttgggaggctgaggcaggcagatcatcagaggtcaggagtttgagaccagcctatccaacatggtgaaaccctgtctctactaaaaatatttttaaaaagttagctgggtgtggtggtggacacctgtaatctcagctactcaggaggctgagacatgagaatcacttgaacccgggaggcagagtttgcagtgagccaggatcgcaccactacactacacactacagcctgggcgacagagtgagactgtctaaaaaaaaaagaaatagtgtctagtagttacctggaattttatcaaaaatgagtagtcttggttgggcgtggtgtctcatgcctataatctgagcacttcgggaggccaaggcaggcgggtcacctgaagttgggagttcgagaccagcctgaccaacatggagaaaccccgtctctactaaaaatacaaaattagctgggtgtggtggtccatgcctgtaataccagctactcaggaggctgaggcaggggaatcacttgaaaccgggaggcagacgttgcggtgagccgagatcacaccattgcactccagcctgggcaacaagagcaaaactctgtctcaaaaaaaaaaaaaaaagaaaaagaaaaagaaaagaaaagaaaaaggaaaataaaagaatattctcaggctcaattctcagagattctgatttaatgggccttggatgggtcctaggaatctgaattttaaactagatgttaccaatgcagcttgtctgttaaccacaccttggaaaaatgccactctaaagccactgtttgattaacagtcatgtgataacatgcatttaaataaatgtcatttcaatttaagaaggcaccatggagggtcctccttggaattcctggaagcatgtatgaaatcagttttatcacatttgagtttatattcattacattttagtgcaaaatattttatgcacaaatgatactttcatgcttaaatgcctatgttgttcaaaaagcctgattctaagtgacccttagctctttcaaaaaaataaaaccaaaaccaatctgctttaaaaagattaagttctgttaccaatgaagatcaagggctatttcagttgcaagtgacagaaacttaattcaaactgtgttaagcaaaacaaacattggttacagagctaaaacgtccatggtttttgagaggatgaagttcttggttgacagggcaggacatgtcaaaactggagagaagcactctgggaaggtgtctgggaggtggggatgctatcagtcagtgggcaggaagaggagggtgtgcaggttcttgtgggaggaagactaggcaggcaaggcactatctggacagtgtgggaaaaggtgaaggggcagtctaggcagatgactggcaccggggagatttgcccaggtgtggtaaatggaagtcctgagagctgggtagggaataatcagaaaggaaggagtaggtgggtaggcagagcgagaggtgtcagtcagctgaaatcagggctccatttacaattagatctagatactcaaaacgtagcttcaaatatctgcttctttccatcaatcagcactacatcctcctccattgttagcttcatactcagacattaagtcaggatgagaagaaaggagagggaggagaatgagttggctgaataccatgaccagatgtttagaaaccaaatcataaaaatctttttaactggtgtctttgaatgtcttaagcttttcaagaaattcttataaccttcaatatctgtttgtgtcatcagtgtcagttcaaatcgattccactgacagcttgataaatgatttccaattttatctcagacaaatgcagtatggttcaatcaatggttttgcttatgtgagcactttaggattgtgtccgatccatttctacttaaaaatttagtttcagtgttgcttgactaattttcacaactctgtgctttgaatgtgtctgaatattgccccgaatccctccctataacaggcatgaagaaaatctgagatagaaataatacgtacttgattacttgatcctttatcacaggcaactaactactgtaaccagatgattccctgctgacactattgtgatacctgccaaagaaactgtctaatgtcacgttaacacattaaaaatgacaaccagccaagcctctaagccttctttcactcttggcatttgtagttgtttgcttatcggatggtgtcacgtttctatgagtcccagcgctggctcgcattatagtcaagtggaaccaagaaaatgctggcaagtctgtcatggaaagctaggcctataatgcacaggacaaccctctttaaccaaaaattatctggctctggatgtcaagagtgccaaggttgagcaaggttatgcctgttttagataatcataggaactctggctcttacctgtaagaaattgaaaggcatgatcaggttttaagcaaaaggaagaatcatccaagttacatttttaaacaggattgttctggatatgatgttgaccacagatggcagtggagcaagcaggaagcagagaggactgttagcagattattgcaataacagacaagagatgatagtgacttagaccagcaaggtggtttttgaggttcacaactttaaatttggttcttttatccctaccatagagatgaggaaacagaggctcagggaggaatataaccaggccacgtggctgattaaaccacggcattagtatgtgggcccagcagtctgatttcaaagccatggtctttccacagcattatgatgcccttcccccatcaccttcctctgtatctctttctcaaacaaaatgcaaaaccagtgacacaggaataaatcctagaaagagcaatcttcacaaggttcctttccaggcctaccattccaagtatctgagctaaaccgacttgagcccgggtcacctcagttacccaaatctgtctctttaaatttccccctaaggacaagattggtcccagaacccagagcagggatgagcctataggtggggggcctctgggtcctacagaggatggagaagagatatgagaggtgggaaaccagtccagcacattttctggatcagcggactgtgtaatgtgtgtttgttaatttgtgccccaaaccacagctgcccatggactcagcacagccattagtggatttctgacagtctatggcaggcagccctgtgttcttcacaattgtcacaatttagactttaaacaattcagagtggtctcttttcatgtataggaagctctctctgggcaaacggtgggtaaccagcacatcagacaacggcatcagattgcaaacttgtctccgtaaattgaagtaatcagaaacaaacagatacaaagttgttttataaaacctcttaaagtataatatacataaatataagtgcatatatcataaatgtatatattggtgaatttttataagctaaacactaagaacattatcagtaccctggggcccccaccatccccttccaatcactactcttccaagagtagctgccattcctgacttttaatactgtaaattagttttgccagtttttgaactttttctaagtggaatcaaatagaatgttcttgacttatttcctccaacatcacatttgtgagattcatctgtgttgttaagtttagaccatttatttttgctgttatataatatgacatatgaatacaaaacagttgatctgttctgcttggatgggcatgtggatagtttccagtttggagttattatgaatagtatgctgtgacaatttcagtgcatgccttttggtgaaaacatgcacaagttcctgttgagtatatacgtaggtgtggaattgcagggttgcaggggaacaaaagatgtcttgataggatgaaatataacatattctagctatagaggtaaaacaatgtgtatagatattacagggaaggtttggataggctcaagaatgaaagcaaaagtccagagcttaggaaaagactgtgaccgtcagcatgcaaagtagagtatagtctaagctaaggaaaatgatggtgtgtgtagatagttaggtaacttgcagaaaccaagtggcagcagtgctgggtagtaaagggctttcgttgaaagacctgagttcgaacttgctctcagtttgactgtgtaactgaggtgtgtcacttgacagctcaaagccttgactttcccttacagaaaattgttgagaagattaaattcattcattcaacaatgattgattgactacctacccatgtgctgaagactggagatccagcaggaaacaaaaaagtgtccttgtcctcattgattttactgggaaggaatacccatggtaaacaatggccatgtaatgacaattatgaaaattgcaatcacggaatctaaccagtccggggggtctgggaggagtgtctgaggcaagtagacatgagccaggccaagaattggggtgacaaatttcaggcagatgaaatagcatgagggaagtctatagagggaaggagcctggcatgtgtaaggaaaagagacagtgagtgtggctgacaggagtaagcagaggggagagtgaagaccagatgcagtggcaggccgggcttttaagtggttggcttaccttgattgctttttttttgttttgttgtgtttttttgagatggagtctcactctgttgcccaggctggaaagcagtggtgccatctcggctcactgcaacctctgcctcccaggttcaagcaattctcctgcctcagcctcccaagtaatttgggactacaggcatatgccaccatgctcgactaatttttgtatttttagtagagacggggtttcaccatgttggccaggctggtctgcctcagcctcaagtgatctatacccctcaggctcccaaaatgctgagattacaggtgtgagccaccgcacccagccccttgattgctttttaagccttttaaactgaaggcaaaaagaggactgggaaatagggtgggagtggtgacaaaatcaggaaagtgcaaaaatatatgctgatttgtaaatttacatttcagtattcatccagtcattcatttatatttatgcgatgagggactaccaagtgcatctgatcatgtctgaaattatttgggtgtcaataactactgaatgggatgaatgcataaacagtaacttacaaggtcaacacgctggcaaaagaaattctgtttaaaattatttaatttcatttgctctgatattaagttagttctttcagtagattttcattctaggaacagtcgctaatatttgttgaatgcttactatgcatcaacttctgttctaagtaatatggtaatatgtaacaggtatgttttctcattcactcctaaccacaacaacgcagacaggtaggattcattattatcccctgctttactgatggtgaagtagacatcgaaaggcacactgacccactggcctgagatcacctagttagtaagcagagagtcaagatttgcactcaggcagtctgattccagctcaaaagctcctaatggctacttctagcttccagaaagaagtcacagacaagcaacacaaatatctggttggtttaattgttgcatttctcattttaaattagtaaattggtattgtgcattacacattaagctcttgtgagctgattagtgtgacttgactctctagggttttgctcccttctagtgaactaataaggctgaatttccaaacctgcaatccagctgtggatcaatggttagaacacaggagagtgacagaaacaaagatggggaaagttgcagcggccacatcttgcaggttatatagaccatgcacacagtttgaactgtttcgtagtgtgtagggaaggagtatgattggttaggatgtgatcacaacagtttgggtgagagatgatggtgacttagatgactatgatggtagttaaaatggagatgaaataacagattctaagtaaaaggctgcacaaagtgcttggcatgtagtaggtgtgctattaaggggtagctattgttaacaaccatggcaaattcatttcaatccagcaggttacatttcatggattggaaatgactgcctgaagcatagcgttggaaagatattctgaccccccttcaggcccgcacagaaggagcactaggatagactggagatgtctgtcataagctctggataaacaggtggtagcacaaatgttgaggggtgctttataaggattttcaaatcaatagtttggatctgtgcccccacccaaacctcatgttgaattataatccctaatgttgcagtggggcctggtgggatatgaatgaatcatgggagtaggtttctcatgaatgatttaacactctccccttggtgctgttctcatgacagtgagtgagttcttgcaagatctggttgtttaaaaagtgtgtagcaccttcccctcactctatatatcttgttcctgctcctgccatgtaagacacctgctccttctttgccttctgcatgtttggaagcttcctaaggtcaccccaaaagcagaagctgctatgcttcctgtatagcctgcagaattgtgagccaattaagcctcttttctttataaattacccagtctcaggtatttctttatagtaatgtgagaacagactaatatacaagtaaagacaagattcttatacagacgattttgaatcgtttttctccataataatattcaaagataaagtgggcttaagctatagtaaaaacaatcctatttattagaaaaaagcaatacctaatggatgatgaaccacagaaacttacaaaattgaccttcggtttgaaagtactcatgggtaatgccctccctgcaaacaaaagattccacaggcaagttagtttgacttaggtcaaatgttttaggcctctcttagaggttcatgatgcatattagcatgctaaaagttcagaaagggaagcacactaaaagacacatttttaaggttgtttaaccagaagtttccaaattcattgaccatgggatattttttcactttatgcttaacatctcatagaaacataatgcctgcattaatattgcattatgataacaagacattgtgctacaaaattggtaatgtcatgtcatcttttttcttctggcttttgtacagctcaatcagtaggagcaaaggagaggaggagaaggaggctagtgcttttttttttttttttttttttgagctggaatgcagtggcacaatcttggctcactgcaacctctgcttcccggattcaggtgactctcctgccccagcctcttaagtagctgggactacagacacccaccacgacccccaactaattgtttttgtatttttagtagagacagggtttcaccatattggccaggctggtctcgaactcctgacttcaagtgatccgcccgcctcagcctcccaaagtgctgggcttacaggcatgagccactgtgcccagccgactagtgcatactatttgttcgtttctagtgaaagatgctcacttaatgataactggttgtatatagcagcaccttggctctgaatctgatcactgacgttgtggctaacaatatttaacctttggctgatgaagatcaagttgcagcctacacccacattttgaagttgcttaaatttggactactcaggagacacacagattctacagatgtgagccagtcacagaacactagggcttattcattttcaaagtttccaatttttagttcagtgcttcgtacataaaagaggctcacaaatggcttttgagtaatgaatgaatacacaaacgaatgaataattatggtaactatttttgctcatgagaaaaggtaattaattataagaagagtaagtattgtgccaaatctaggataaattttaaataacacaatagccttaaaattaaacaagagttctttttttgttctgtggagatttagcaagttagatctacttttgtctgaattatacatgctgaaaaaatggcatcttcagacacaaattggctaacgttattaagtaactttgtcctttaattaggcaagtcactgaatctctttgttttcttgtctcctgcgataggtgaactctaagttctaaagtgtccatgaatctattcacttataaatatgatgctttgtactttttttttcttgcaacaccgggaaagtgcataatgttcattctaaaacccagtctaagtccagaccgaaaaagcctcaggaaagcacagaattccaacatgttttgcaagaaaatcctcactcattaaaggtatgctcataagaggaaaacaagaactctattatattttcctacagaagaactgtatgaagtcctctccacagaatctcagcaagaacaacactctcttctgggacaatcttgatgaacatgggctaccttgggaactggtgacttgggcaggtcccctaataatctttaggtaccattataagccaacacttacatgtacttattaaatagcagccactgttctaaatgctctacttagacaaattcatttaatcctaaccatagccctaagaactgggtgggattattatcttcattttacagacgggcaagttaaggtatagcatgcttaattatctaactgttatggacctattaaatggtgaggaatcaagatagtatgggtccagaatctctgctggtaacccctctgctatactgccactcaggatatcatctagctattgacgaaggctgaaacaaactaagtcaactaacacttatcgggagtccaccatattaaatgctgtaaagaactaagggggaataaaatgatgagggcctcattactgcacttacccagctaacaaataagcaacatactctaggcagaatgaaatgaatattagaataaagattcttcggaaagaggaggtagaatttgatatagccttgaagaataggattttaatagatagagtggaaagacaacatttcagattcaagcaacagtgcgattttagggtgtgccaattaggcttgtctgcccagattgtaagacacacagtagggcagcggtccccaaactttctggcaccagggaccagtttccatgggagaaaatgtctccacggactggggttgtggagatgatggtttcaggatgaaactgttccacctcagatcacatcgggcattagattctcataaggagtatgcaacctagatcccttacatgtgcagttcataatagggttcacactgctatgataatctaatgctgctgctgatctgacaggaggtggagctcaggtggtaatgctcgcttgcctgcttctcacctcctgctgagcagcctcctgcttctcacctcctgctgagcagggttcctaacaggccacagtccagtgaaccctgcagtaggggatgacatctggctcttgaagagtctcaatgctgtgctgagtctaaatgtcattgtgtaggcaataaagactaatttgacttttactttggagtataactcgagatagaatggtgggctataatctgagcaagaagaatgagaaattaaatcaaggcagtttcagtaacaagtgtaaaaatgggtgatgtggtaccagggtgttgcgatatggtgcccagacctccccttcagtaataatgatcagattatccaagtcactgggaatgctgccaaaagagggccttcggccaaggtcatgacctcttcctgggatggtggcatcaatgactgatcatcactggggatataaaggcccctacctctcaccacagctcaggacagctctgaagggccatctcagcctcagaactcaccacattgtagttgaacttctttctctgcccagttgtgctttctttccttctctttgacaaactactgtctcaagagcactcccaataaacctctcccacactaatctctgtcctagagtctgtatcctgggacgctcaacctgcttctgatggctgtaaggtgcattataaaaacaaaacccccagttgggcatgtatgcacgaatgtagcaaatgaaggagaagaaaaagtcatagatgatgcccaaccagcatagctaggagggtggtcttagccagcatggtcactccctactcagcccctcagtgcagtgtctcttcttgacccctataatctactcctcacacatgtggcagagggattcatgctccaaatcttgccatcatgtgcagaagaaattcaagagtcctttatcctgcctacaacatcccacctaattggccccccagatacctctccaacctccccatgcttctggactccagccacactgacctccttgcagttctggaacatgccaaccatgtgcctgttggtcccccagaaactcccataggcccttgtctcatttcatttagccctctctgctcaaaaattccttctcaagaaggcctcctccaactactccatttagcatagaaacccctgtcattctctatccgtttaaacccacttaatttttttccaaagcacttatttcaagttgccattggtacattatttacctatgtgtttatgcatggtctctttctctctctagaatgagagctccatgaaggcaagaactttatcatcttcactgttatatccctggtcaggcacataatttgtacataagttaatgaaaatgagagtcataggagaagtgtgttttcagcagaaaatatcagttcaattttgaataggttgaatctgaacagcctttacaacaaagcagtcagatcagatgtttagaagacagttactcatagtacccagtctctgtgaggtgtagggagagaatgagctagaatggcagttcctaagttgctctgggggaatattaacctcatggcaggctctttgaaatacagaatggttgggccaggtggtggctcatgcctataatcccagcactttgggaggttgaggtgggcagatcacctgtggtcaggagttcgagaccagcctggccaacatggcaaaacctcggctctactaaaaatacaaaaattagctgggcatggtggcatgcccctgtagtcccagctatttgggaggctgaggtaggagaattgcttgaacccaagaggcggaggttccagtgagccagatcatgccactgcactccagcctgggcaacagagtgagactcagtcttcaaaataaataaataaataaataaataaataaataaataaataaataaataaatacagaatggtcatattccttcaatgaaataaaaaccaaacagctttaataaaagaaaaattaataaacaaataatggataagagggagatgaagagaaacagaatgagagacagagaaacgaaggggatttattggctcatgtaacagcaatgtccagaggttcaggctggacaagatccaaggactccaacagtgatcccagaatttggtctgtctccatctctcagctctgctagtcacttctctgagggtctgcattctcagccaggctctttccaaacagaccacatggaaagtagatcaccagaattggttccaattccttcctttcaacgaacgcagtgaaagatggtgcctcttccacaacagttctttaaaaaaatcaaaggaattggacctaaggagctggtctggcttgagtcctaggcccagagggataaatggtctgattcacttagactgggtcatctctgacactgtgcgctgcaggttcccaggagctgatgatgtgcctctcttcccaactccatgtttagtgatttcaccttggtagcttaaagttggccatggtaaaagtatttacaccatggaaaatgtcaaatgctacaaatcaaggattttcttctttttttttagaattggtttttaacacttaccaatgaatcacttgtcatatgaacatttctaaagccaggaatgggggacagattcaccagaactcagggactaagaatgaggaataggttccctaaaggacaatcaagatattgttaccaggaaaagggatgactgttgggaagcgtcctcccatatattatattattacattacattatgttataattgaggatccacaatgaactaagggttctaaaaaggcctgtgacttataaagctgtttaactcagtgttatccaaccttctgtgattagaaagtctcctttttcataaacttctgattaacttctcaatgcctttggaaaatagtgaacaagagtatagagatattaatacaaaagaagggaactaacaatttatatgtagatctattgctgtgttagtggctgggggaaaaaagattcttaatgttttcctctcccttgaatggcaaatagaaaatgcctaaaatgaagaaaatattgattttaaaccaactgatacgtctgcaaactttattttaactttgagccactaaaagggatttaaaatcaaaggaacaatatatttcctatatcttttaggctgaatattatatgttaattctaatatttttatgagctgtaattaaccttcggtcattgagaaatcaaatactcaggcttttaagcttatatctaaaacttcatctagtgctatgataggaagaaaaaatgaaagacagaaagcaataaaaattaattttaaaatagtttctttttttcttttcttttttggcaactcaggctaatcaaggacattctgaccatgttttgagagtcttaatacgtaagcttcatcagagtcttcataagacaaagggctttgtctcactcactgttgtttccttagcatgcatatgtattaagtactcaataaatatttgttgaacactaagttttaaaaatcaacaatggggctgggagcagtggctcacgcctgtaatcccagcactttgggatgccgaggtgtgggggatcacctgaggtctggagttcgagaccagcctaacatggagaaaccctgtctctactaaaaatacaaaattagccaggcatggcagtgcatgcctgaagtcccagctacttgggaggctgaggcaggagaatcacttgaacccgggaggtgggggctgcagtgagccgagactgcgccattgtactccagcctgggcaacaagagcgaaactccgtctaaaaaaaaaaaaaaaaaaatcaacaatcatgacagaggtatattttatccacttgatgctttctcatatacatcatctcatttcatatgttttgtggacatatgaaggcactgtctgcccttcccaccttccttcatgtaggaatttaccttcccccaatagctatgtcaccatccgggactttatattcttttacgtggcctttctcccttccctttttgcctaaattagttaggcaatagctatgctgccatttgggacttaatattctttttcatgatatttcccccttccttgtttgcctaaattagtgagggctgtatttctaccacttgcaggaaaggaatcttcattgaacaattttcactgttatatctgttatactgaaaactatattaatggaatactgatatgctttgttcttcaactgaaaatttttattttctaaagataaagtattaaacatccaaggctcaatactgaatataagtctagtataatttcaacaaattccttactaaactgctgtgcaaaataaagatgaaagctcacacctgtaatcccagcactttgggaggccaaggtggatggattgcttgaggccaggagtttgagatcagttggccaatgtggcgaaaccctgtctctactaaaaatacaaaaaattagccaggcatggtggcaggcgcctgtaatcccagctactcggcaggctgaggcaggagaatcacttgaacctagaaggtgtaggttgcagtgagccgagattgcaccactgcactccagcctgggtgacaagtgagactctgactcaaaaaaaaaatatatgtgtgtgtgtgtgtgtgtgtgtgtgtgtgtgtgtgtgtgtgtagtgtgtgtgtatatatatattgtgtgtatatatatacatatgcatatgtataacactctctaaatccaatggagacaaaaataacactctctaaagccaatggaagtgtctagggatgctcccggctgttggtggttttgaatataacatcactttcaggttgaagaaaggagtaacccaccagagatgaatagcagtatgagaatccagtcatgggggactgggtgtggtggctcacacctgtaatcccaacactttgggaggctgagatgggaggatcctttgagcccaggagtttgagacaagcctgggcaacataatgagaccctgtctctacaaaaaataaaattagccaggcatggtggtgtgtctgtagtcccagctacttgggaggctgaggtgggaggatcacctgaacccaggaggtcaaggctgcagtgagctgtgatggtgccactgcactctagcctgggcagtagtctaaaaaaaaaaaaaatccaatcatggggtctcaaagcagaagagtagtgtggggaagggggatgggctgatcctacagagacacaattctgcactcaaacaacacccgaaggaaagagcaagtctctatctcaactagcaatacaatctgaaacaggaatgcaggagagaaagagttagattcaaccctacagagacaaaggacaggagccatttggactaaagagagacagaattcagagcatgtcctttgggttgagaagagcctttgacagcactcagtcaaaacccaactttgtcaaagcctcactcacagcggcactacggtgtaggtgagatcctagtgaagctcctgaaactagaagtggcaggagaaggttcagtggccagcactgaagtggaacatagcgttcaggaatgaggagtgtgggctttggagccagactgccatggtttgaatcacactgttgtcagtaaccgtgtggcctttggcaagttagtgaacctctttgcctgatttgtaaatggagatgacagccctccctgtaacttgcaggattgtagggaggatgggctgagttggtacacagtacctggcatgccgtaagtgcttaataaatgttcaatgttttctagtgattatgaattctgagccccacttttagccaacatcttctaaatcattataaattatgatgactttggaattaaacagactggtgcattcatatctttgttattttactcctttgagctttggtctcttcacctgtaaagtgagactaatatctacatatataaaacacagagaaagtgcctagcatggggactctttatgttaataaccaattaatattaatctcccaacctgagagtcacctgcacagctatgtttctcttttctagagttaagaaaaaacccagtaaggttagactaattggtatagtccaggtcaagactacttgggtaggtagaatggaattctatgtgaactcacatttgagtgggatactacattgattagggtagtggaaaggtttctgtcagcccttcaagtccaagaccctgggaacaaaatagcctgaaacacaagatttcttgggcgtgtcacagaaaaaaaattccaagctgcagactttccctttgagagtggcgtcctcagttaccttaaattccagtagaaacaccatccacagaaatgtccctgtttgccagagctgccatagtgatggccacttttgttttcccaatatgagacccaggcagtgttccagattaggtacccgaagaaaaccctggggatattactgttatttaaattaattatttaactgactagttatttttcagctacccagtgtttcagagaccttgaattatgcctattggcaaatgtgtaaccactgaaaattcttcacagtcagaaactggaaagaaaaattcacccctgtagttttaggttttttggttttgtacataatattgaaggtggtggattaagtgcaatatttagaataatatattcaaggatttaaggaatttgagttcaattttgaaccactccaccacccctggctggacctcagctcaatcccttaatcttttggcttctttctccatctgcacaagatgcctctggcaacgcactgagtgcagtagcataggaatacattcaataatgggcttaatatcaccactcaaaagggagtaaattgcttttttgtgggatccattagcttaattgagaatattagctcagtattctggatgtacgatgggctataagaaagaaggtagcatcaatttaaatgttttgctttgcctccctaaatgactctggtcaacagctaagaataagaatataagaataaggggacagaaagaaaagcagggacagaggagaatgctcaggaagtcaaaaggaagaggtaaagggatggaggctcaatggctaagaagtgaggtatacgtgaagacggaggcggaaaagaagatgggagaggcaagaagggaaacaataagattccttaaggagaggaagagtaagaatgtgaaacgaagattccaatcagatggaagttaattgggaccaaccatatggagaggggcagagcagaggggatggacagagttcactcgggaaagagagggtttggtagggctgtctccctccctcctgtcactggctgtcttcacatttgcggtgctcccacgatccccaacactaggcttttggctcagggagttggctttaacagctgtgccatttagcctcccaagagtataagaggtctccaagacccagggagttaagcaaatgttagtgtatcgggggaaagtgttcttacttcatgttcttcaaattaaacaatgaagtgaagtcatagaggacaggaggtgatggtaaacaatacaatggaaccaaagggaaaatgactgctttatgggtatctcagtgataccaatttactcctcataattctctaagctttactttgcaaggacaattggaggctagaactgcctcaccatcactcctactcccaaagctttgatagacttaggagtggtagtagaaattataataacgataacattcacagcaaatatttattgcttactttgtgtcaggcacatacacatgcatccttccaaaagggatttcagatggtctacaataagacaacttctaagaggggaggaaaaaatagatatatataccttggctgaggaaagctacagtaaatttgatatagcaataagtggtttgataggaattaactcattttgtcatctctacaaccctacgaggtaggtacttttaataagccctttttatagagaaggaaactaggaaaaccaagacttgattttacatcattggcttcacttcaaaggctagggaaaacaaaaacaaaaacgaaacaaccacagtaagagtctcactacttactttcaacaatagcaatgttcaagttaatcaccagaaaaaaaattagctctgtatgccaccaaaagatagccaaaattgttgtgtagtgtccctcttaacttagatatgtgagtatcgctcaggtaagtacccttaagacaaattcttcccagagactgggtcaggaaaggctttctcctgatgaaactgtaggactccttccacttgacaatgagagctatgcaaaccttcatttcccctatttcactgctatgaggaagcttgggctcagttttatgctcaaatactattgtttgtctcagccagaatttcaacttttcttttttaaaaaatatttgtctttcattgtaaataaaccaccttaagtcccttttggaagaaggcacggtataaataaacaaaagacaggctgggcgtggtggctcatgcatgtaatcccaacactttgggaggccgaggtgggtggattatgaggtcaggagttcaagaccagcctggccaagatggtgaaaccctgtctctactaaaaatacaaaaaaattagccagacgtggtggcggacacctgtaatcccagctactcaggaggctgaggcagataattgcttgcacctgggaggcggaggttgcagtgagccgagattgcaccactgcactccagcctggacgacagagcaagactctgcctaaaaaaaaaaaaacaaaaaacaaaacaaaacaaaacaaaacaaaatgcaatcctgttggggccaagctagagatataatttatcaaattacttgacatagcaccctgaaatcattgcatctaaaagagaatatcctaaacagaattttgagcagatactatttttgatggtctttgtcatatttttcatgtctctcaaatagcattccaaaccactttgggtaaagaacataaaatctagagaaaattatctgattactctcaaatgtcttcatgttacagggatataattaaagttttgaatcttgtccaacactgtgctcaaaaataaaccaatttaagtctacatttatcagtcaggcttaaaatgaaaaaaagtttcactcatttcaattattcaccggttaataaactatgcttaatttgtagaatgtttttttttttgcttccaaaatttattccaggaacacagccatatcttctcctgctgactgataaacactatatatattagatcacacatagagaagcctgtttaagggtcaagatgtaggtgatttaatgaaaaaaccaccatcaactcaaggttgctgtttctgtgagtaattgatctgttcaaaaaacaaagcgtttcatttccagaactttcattacaggtgtgactatgatttttgtttcatttaaacattattatataatgatgcatttcaaatgcaatagcatttacaaaaaagaaaataaattatcaaaacaaaaacagaaagaagagccagtagctgggaagaagatcacagacgtttagcacaaaataattaactaagaagtcaattctgcttatccagcaagtacttacagctcaacattttgctacttcagtcccattcaattttagcttgtgacaaaacctacacttttacttcagttttgtgacttactctgtttcattattttatttattcaacaaacacttatggagataaggctcgttgtattatgcaatataagcatcaaacaaagtacgttcttgttctgatacttattttgcaacacttcatgaaattgcaaaaagtaaatattatataaattagaatttacaacacagactggtctatgacaaagtaagtaaaaatagtctcaatccatgagacttgaaattgagctgaaattccttcaggagtccatatggattaattcagatttttatacaacagataagaaaaatttattcttgacagcacagacagcagtcaggtgccccaagctgggttatggcctggtcaaatattgctaacatatttttaaagctcttgctttgttacagaaactccgtttttcctcacgaaacagtgcgtataccgcaactcttcaaattgtacctcagtatggtgtaaggaatgtggtgttccttagaagctgtggcaaatccctaaatttcttacctgtaaaatgggtatacatggaaggcaggtcttctgtgaagctcacacagcataaactttcgggcatcttctctaggcctccatcccaggccttggcaggagccttggcgatacattcacctggtcatatgtttatgtacaatttgcaaaagcaatatattgtcaccacaattagctgagactgaggtctctttccactaggactttccctctgccattttcccttctattgggtggtgctagggcagcctggacatgctgtgggatagggtcaggctttgtgttcctacccaaacctcatcttgaattgtaatcctcacttgttagggagagaaatgacttgattatggggacagttttcccgtgttgttctcgtgatagtaactgaattctcacgcgatctgacggttttgtgtttggcaagttcctccgctcacaattctttccgcttccttgtgaagaaggtacttgcttctccttccaccacgattgttaagtttcctgaggtctccccagccatgtggaactgtgagtcaattaaacctctttcctttataaattacccagtctcgcgcagttctttatagcagtgtgagaacggactaatacacagtatttgctttttctttaagaggaccacccaaattgcataaattgcaggccccacaaaacctgcattaccccctaagtgtgagaatagtacctatttcacaggtgtgctgtgaggattaagaggtaatggacacatggtgtgtatcaggtggatgttagccattatcactactctgaatctccatctttctattatagcaaggccacagaaatgagcattttatgtaatattcttaaaactaaattcttctcatggaatgggatttttcaaccccaggcaacagggccacatcatgtttttcttgggctctaggcctttttgccttcgttgagccccttactccattaaaatatatatacatatacacacacacatatatacatacattttaagattgtattagcacaaaaacaaatatattaatatatattaaaatactttcttaaacctaaattttttttccttctgatttgaaaagaaattaaaatattttttgtgggcctctaaaaatattgtggaccttaggcactgtgcctaatggaaaagacagtgacaggattgtgcaatatgaataatgataaatttcccaaaccatcaaggactcaagaataagggtaaacatcttaaatggggttggtttcgagtacttataatagaaaaatgttatccaaacaaggtcttaggggtaacaggaggcgtttttagtgttcaaaatacgcacatggatggagttggccattaggacgctaatagcgaccgtatctagctgtgaaatacatatttttgttttgggagtctacttttcagtaaatgtcctttcaggtgttttgttgcccatttaattacatgatcaacaaggaagagttattttacaaaacaagcttcattttgccaatttataaattgctttggagtttcatcgaaaggtctttaaaaaacacgttggccttggtgctggtgcatcacataaatcacagatgaaacaaacaagcctgtttcctactcaaggtgtgtctgtagagtcctgactgcgtgccaggggctctgtctggcacatttctgaactttgcaaaattaattgtgccgaagagaacaccatcaaacgcgtccggcatacagcgtaaacatcttcagaccgtgattctgcgccatcaaacgctctccagctaatttcatttggtgattactctgctagaaaaccgaggccaagtgaaactgcggaaatgggaacaatgtacggaggaaaaatctcaccccattaagagatccgtttcttctccgcacaaataagcccaccccgcctccgaggcaagactagatggctccaggatactctcggcgcgcccgctggccatctcgggcaggggagccccacacccggcaggaggaccaggacgcgagcggcggcgcctcggccctgggctgtttaggtaattcgcaaagtcccaacaatcatccccctctcccagaagctggttttcttgtgtgcagtggttacagaggcggcgaaaacacggttccccgctttcctctcctcaaggcactgtttgcagcggcagcagcggccgcattcggggaggcgcggtcctccccgcagagccgtcgcgcactcggcctttctcgaggatttgcctgggctcggccgcctcgctctcccctgcgcttccatgaccttctgagagcggcctcaccaccggaggctcggaggaagcaccaccctcggcgtccggggcccgtcgcgcggccgcgttcctccgactccttggagcacccgcgcgcgcgggcgcgcggccggggatcggcgggggcgcgcgggttggggcggggccggggccgggggcaggggcgggtcaggggcggggccgggcccgctgcgcccccagccgagcggcgtgcaggcgccgcccccgcgcgccgcagtcccggctggagcgactcggccgtggcggtggccgttaccgttgcctctgggaggctctggcggcggcggcggcccgcggggttcgcggagcgcagcgggccgcccttcgcccgtggccgcctcaagcagcctcgcgccgacacaggggaggcgagacggcggctgcggaggcggcggcgcattgtgcccggccccctccttggcggctcctgcccccgggcggctgtgggatctgggcagccccggggcggcggccgaggctacagagccggcggcaggggatggcaagatagcggcgcgggagcgtaccgtgagtcctgggggcgggtgggcgcggcgcggagcaggggagccgcggagccccgagcggggtccccaggggcggcccgggcggggtggggcagcgctcccagctctgcggagcgtcctaggggagtgaccccggagagcgccgctccgggtcccgccgctctccgcgcgcccttgggtcaccctcgtgtcctgggggacgcggactccagcgcccagaacttctgccccacgcagggcagtgagttctgaggccagaggttacctgggggatgggagggagcttgaaatgtttttccttcggagaggtgacctgccaggtgatttcgtgcccctctgcttcaactcccctttaaacctgttcctcgtcctttctgtatccgtagtgcatttgacttacctgtatttttatgtgctaacttccgaaggtggtgtactggttaaacccaaagttaaagtgttggaggtcaaagttaggctttgtgaaagatgccatttctgttatgttgtgtaaaagcacaaagctggattcaggagttctgagcgacacaaaactgcacatcacgtgttctgaatttacatgattaatctgaattaatgtgatttttgccccccaccccccacattccgctaccaaaaatatatgaggtcttttatttgcagttgggtatctttgtgttcctttttgaatgtttaatgcagtcaaatattgttataacctgtattgttattgagtggcatttatatggaaatcggttctttgcatttctttttatgtgtctttaaaagatacattctttcaacagaaaagtttcagtttaaagtttgtcttccgattcctgttcagtttcagattagtttttaattttaaaaagtatttgcttgaagtaagattaatgtgatatagtagtatcgtttaggcaggggtccagaaatggtacagaaattaaatttaaggcaaacctttccttttcacaagtggaaaaaccaaggagttttttcagcgcgaatgctacttgcccttccccttacatgattattttgtcacagatctgaaattacatttcactgttaccagagagtttcttgtctaagcctggcagagaaaaggaagcctaagtataatgtgttttttaaaaacacgagaccattcttttagttgtcttctacgttgactttatgctttatagtcgggggcaactgttcatttggaaacttcattagggagttagttgcaagctcaatttaaatatatgatgtgttcccaaggtgatcggagcagctatttcctcttcaagaattgaattgagacttctttgctttgtaataggtgagtgagatcactagcaagcctcttgattagtggagacttgtattctcttctggggaatgagaatcagggactctgctgttgaaggagcaaaacttttgtgatttttgaaaaatttgcttctgaatggtcatccttgacaaatatgttggtaatagtgtgcatttttcttacattaattgtgcagcaggtaatctattcacactggagaagattcaatagatataaaagatacggagtatacctctctcccatcatgttccacagctactggctccttgtgtatgtctttccagacatagcctatgctcatgtaaacattctgtacgtgttctttttgtttgtattcctaaagatgaggacccattgtatactctgcaccagctccccctgccccgcttccctccccagagtactaaatcatggcagtctccattggtatctaagagaatctgcctcattctctaacagctgctgagtactccattagggatggaccataatttatttaatctcttcattgtgatatatgtaggttgtttctaataatttgctatgaaattgtaaagcattagtttttgaggtttttaagtggatttggttattcccaaaggcctaaaggcagtagtcatttgtttctttatatcaccttccaggaaataagtgtgccttctccccagcatacactgtttgcttctatataacttcacagtaatccataagagtctttggcatctttgctgtgaagtgggagccatgatggtcagtaactaaagtcattattccttgggtaacaacttggctctttgttttaacaaaagaaaagaaggaacagatacacattttaaagaataatctgaggaaaaattcttaagtgtttaaatatttttgaacgtagagaggcagcttgtacctttgattaaattgaagatgagggtagtttatgtttcataaaattcggttgccattaggcactcaaatccctgccttctgtagattatcaccagtatcttatattttaatgttagtataatatggttacagattttacagtttatgatggggttaataacttttaaggggatggatgcttttaaaacatacttagctcttgcttttctttaaaacaaaaaaattggggtctcgtcagcatgctcttgaaaaagaataaattgtaaaagtaatgctaatgctagaaattgagcctaatacattataaagcttgaacattagccaatgttgagcttcagtattttcattatgcttatttttgagggcttttaggactagtgtaagctatcataatcttttaaaatatatacatacatataatatatatatatatatatatatatatatatatatatatatatatatatatagtttaaatggtccaaactcctcttagaatttaaggcattctcttgccttttatttggtactgttgtgatacaaaactgctaacgttgtctgtattttttctgaaataggtgtttattgggcatctgttaatattccagacaactttctagggactaaattatggcactgcacaggacagacagaccctgctataatctcagcgaaggagatggataagaagcaaagatacaataagtgatggtgactagatagtgctaagtgctgtgaaagaaagcaatcagggttgcatggcagaatgggacaggatgtgggctgctgttttacatcaagtggcctgagaagcctctctggggtggaggggtctgagctgagagttgaatgagggggaagaagcctatgattttggagatctgaaagaagagtggcttaggcagagggaagggcaagtgcaaaggccctggagcaggactgagccttgcatacctgagggacagaggaccacctctgtggctggagttggtgaaaggaaaggagagagctgcaggcagaagaagagtgggctggggttggtgcccatatgtgttgcatgtcaagaaatgtttacagacgtgggaaagatgtgagtggtggagttcctctataggctggaagctccagggggctagcaacacatctgcttgttacccattgcatttgcagcaccaggaaccaccttcatcacatagtgggctatgaatagttattgagtaaatgaataattagagaatttacgaaataatcttacctgcttttggtcaaaatacttagattcgggagtcttttagttttccagcttggctctggcctttgacatcagccaatcggttatactgttatcacttttctttcaaattatcacttttgtcaaactgttgctttaagtcaattacacttgactgctcttccatgaaattcaagtgtaaaaccttaaaaacaaaccttttcagtaaattatagtgatttatgagagattttcagaaaggtgagcatttttatcttttatttccgtggaatagccatttgtataagtgtaagagttcaaagatgccttttgtgtgtgggtgtgtgtattgaatgttttaattctttgggccagatgacagactaatgagtagataaaatatatgtaggtacttttattctcacaggaggaatgtgtgcctgccctatagggaatatcaataatttgtggcatttccttttcccaacttctaatctgtcattctaaatattaattgaaaacttgggaaatgagttttatgccaagcaattgttatagatgtctaataagaatctacatctttctcctgtgacttttggactcctgttccatattagaagtgttgtgatcttccagaatgatggtttttaacttttttatttcctatcttaatcaattaataacttagcataataagcagtttctacttaagacaattttatttccaactgtttctcttaagttctgtgcaaattatatgtaaaggagggttctttaggtcctcagtcttcagtaaagaagcctgtgtccttttgtcctgatatagtaaaagctcttcagtaaaagagtagaaacacctaccagttggggtaaatttagaggcttagatgcccgagttaaagtacttttaccaattcctttacctttccttttgtgaaatatgggaattgcaaatttgtcttacgttgtctaaaatgacaacacatgcattcttataggatgttgctgctggtactgctcaggtgagcaaagatatgtgtttgggagatactattctatgctttcatgttggaagttgaggaaaaacttctggtaggtggattttttctatacttttgcacagaggtgaaaatcttggcttccaatcattcttctggtttgtaaggcagatacagagaaagaattggaatcattgtttatatgctatattactaagcggcagtatccttagaggccacaaggcggtgatatcactacctaaagtgtatgtgtggtgctcttccagagaatgccttggaatactgaggcctcttgcaataccttcttttaacttctccccaaagtgggcttctccaaagacaccttgaatccgaggactgttgaattgtggaacatctggtggaaaatagcaagaggtgacagaaatgctaatggggcagtgagatgtagacttcaggcagaattgttgtacctgtcgagttggaggtaaggtgagtgggagagagatgagaatcgccaccaggactttaggctgcagcccctgaggacacccgagtgccacagtaagcactaaggcgcctgctgcatggggacaggatgccaactgtttccatgcaacgggcctggagacccatagccctgccatgcttcatgccttagtgtttataatgcagtacaaaggtgaaggaggcaagaccattgcaaaaacatctccatagaaacagttaaagttaggagcatacattttcttcttgctggaacttcatcatgactacatttattccttgaagttgcctggatcaccacaattttactgtaaatgtaaaattgttcttttgggagagtctgattttgtggaaaaactatttagagcttaaaatgcatagctcttatgaataatagaaaattaagcacttaaacaaaaatcaagtaaagtagataacttgattgaaagctggaaggcccttcagatccatctggtcagcttcttaagataaagaaacttagacccagaggtggtgttataatttgccgaagaatccaggagtcctgattggcagtgtaaccatgatcttcggactctttaagtgcagggttctcaactcctctctagaaccaacagctcctcaagggcaggaacttttgcgagatttaccaccgtgtccctagcattagaacagtgcctagtctatagtagacgttcacatatttgttgaataagtgattatctaaaggaattttaagaacttcagattgccatgttagctataagacagtacttatacaatctgaaagaatatacagttttatgagtttcttgttagaaaaatagagcatgttgctattaaaacccaaactcttaagccagacaggcaaacgaaggtgcagtgttttacatcttagcttggtacctttcaaagtctgttatcactggattttctaaagccattctgttaagttcagcctactggtatctggtatcattaagttttatattttgtatttgaaaacagatgctttaaaatctagcatttattgtttgaatttttccctgtttttttttcagttgtgctttatcaatagctcagctattttaaaaatttatggccatatggggatatgattgtttaaaaccaaatctaatcaactggaggattttggaaattgtcactttcaaatgctgttggtgggtgtttcaattgttataactttacaggagggcaattttgtattactcatcagaagcctcaaaaatgtgccccgtcccttagtcaggcatgttcaccgctagcaatgtaaacaaaggagaaacgataaagtatgtgtacagtgaccagtctttagcagtggttatagtgcatttgtgcaccatactcctgtcgatacctttctcctcgcagtgattcttaagaagcctacttactgggatgtaccaaaatctggagggaggtcctctgaaatttggaaaaaactcacttccagattctagtgaccaccacaaaaaaaatacatttaaaaaaaccctcctctaatttgcaaaaataatttttgtaagtttttttttgtgtgtggaaacggagtctcgctgtgttgccctggctggcgtgcagtggcgcagtctcagctcactgcaagctccgcctcctgggttcacaccattctcctgcctcagcctcccaagtagctgggattatgggcacccgctaccacgcccggctaattttttgtatttttagtagagatgcgtttcaccgtgttagccaggatggtctcgatctcctgacctcgtgatccgcctgcctcggcctcccaaagtgctgggattacaggcgttagccactgtaaccagcctgtaagtttgtttataatagttataaactagaaacaccttaaatgctcaataatagggggactcattaaatgaattgtggtgcatacatgtgatagaataccctttctttaacagtgatgtaggggaatatttatagatgtggaaagatactcaatatttgtaaactgaaaaagcagattgtaaaacatatgggtacgttgatccttgtttttgcttatggagtgtgtgtgtgtgtgtgtgtgtgtgtgtgtgtgtgtacaattttctacatattatgtagtaaaatgccaggaagactataggccgaatgttaggtgatactgtctttcatgtgtggaaattacaattgactgttattctttttactttcctggatttcccacacataaagcatgccgtgtggtgaagagtcttggatcagatcccatttcccatttgctactactggttgtgtgaacttgggcaagttttgtatttccttatctgtgaaatggggataataatatccagctcacggtgcccacatgtagtatttaataaacgttaccttgatctcactgatctgatatggtgattaaagccagtattctattcttaatacagaatttccaagcagaataattgtgttatgtaagttttatcaaactgttacggaaagcatttcagggcattctgacaaactattttgttgcttctggtcactgggaaatactttgtcgagttttatttactttaaaactgaaatgccttccattgccaatacattttattttgaattgaaggcatttttcttctttttctgttgttgtcttgaatagtcctgtataaatttttgaaggtcagggtctgatctttctttccttttatagaggtgttagagtgggatgtgagtcattcaagtcactgttgagtgccttttctttaacaggcactaggtaggcatcagatttgcagcagtgtcctggacccacatgtctctgccctgtgaatgacatatggaagtgaccaatgtggttcaaagccaggaggcccactcaataaatagatagttactgcagttaagtatcaagtagttctcattttctctcctctgattttaaaaggaattttgttgtgatgttacatcttactgaacacaaacattgcctcctgcttattcaacaaactactgtatatgaggaacatactaggttatttcacttcgttgacattcatgaatgatttagtgatgacttacattacacaagtgtgagaatatcctaggttaataggcttaaaattgctactatatatcttctgtgaaggataatctttcattatcttaagtatgacctcatgcctttttgagattatcttttgtaaaattattgaaaatgagctcctcctagcaaatctaggatgcatggaatttatggctatcccacttgagaaattctagcacatgatcttactgagagagagtggcaataaagcatttatagtcgtgtaccatagaaagatgtttaggtcagtaacagaccatatatatgatggtggtctcattagattatgatactatatttttactgtaccttttttatgtttagatacccaaatacttccgttctgttacagttgccttcagtattcagtacagtaacggtgcacagatttatagccttaggagcaataggctattataccatatagcctaggtgtctagtagactataccatgtaggtttgtgtaagtacactctatgatgttcacacaacaacaaaattgcctagcacgtctctcagaactgtatccttgtcattaagcacacgtgactatatttaaaaataatgtttccatttgacagtgtgtaaaactacattagttttgtaattagttttatgtagggactttttttttaaagttggcaactgttctaaatattttgataacatgtagaccctcagtagtcgtgaaagatacgtcttggaatctatgacaaatactgagcttgcattttattttcctcatacggccaaataaaaaaaagaaaatttcttgagtcatgttttcatgttcctgtgtagaattcatggtaggataagttacatcacaggttgtgtaaccaacagcaaagtcaccattttacttctttttttgctttaataaattagccatattttgagagggtgtaagttaggggaagaacaaatttaggagagttatgaatcaagaatcatttttggacacagtttaagatacgtgtgagacttgcaggtgacaagttgtgcatatagatatgtattctatctatctcgtcacactggaggtgacaagacttgcaggtgacaaattgtacatatagatacatattacttctatctcacattgttctaccccataccattgccttacatggactttactccccttgcccccactggaactggcagttagctttcttttgggggtgttggggatttacttttcacaaagaaacactgtatgagctgcactgagtatgtaatggtgactggagagcaaccaagctgtgttgacatgtagacattgggtcgctggctagacttaggactttgccaactcaccctttcctgaaggccagcttcaataaaattacagatgactgttttgaaactttttcagctcacaaatagtcaaagctgtgagtgctgaactcagtacattccacaggctgcattgctgggatcaaaaactcaaatgcttacagggacagtggacgttacataaatggcagaagtgggcctgtcctgccttttgtctttatgcttttgatatagagacaatcagaaatatatcactttctctttaactctactgcaagatagacaacattgacaatctagatggtaaatggcaactggaacttgtctcagttttgaagaccagtaaggaaaggtgagaactatgaaaaactccagaacacatgttcttaggaaggagtaactgctcttacctggagttgattgttatcctgtgagatgtggaatgagtatttccagagcttcttaattttgatttttaaacactccattttgcaatattgacaaataattcaagggtttttaaattttgttttttttatgtatatggttcaaacaaaacacatctaaaggcaaagcctgccagttttaaactatggtaggtaacatttctttgcccatcttttccttcacttttttcatatagttcaggtcatactggatattcagttttgttccttatcttttcatgtaatggcgtatatatgtttcttcatgttgctaaaaattctttagtatgtattgatgactgtgtaacattttattctctggatgaaccataacttgagcatttacattgttttaaatttttccagttcgtaattaaagttacagtaaatatatttaagcataaagctggatttttccccttctccaataaatttcacattcttcccttaaaattggtttattgagtcaaaacaactaaatatctttaagacttttgatacagttgaattttctccacatttatttgaatactaggaaataaaatatttgttcattttattagctggttttattttgtgatttatccattatttgattttacattggattttttcttttttttttttttttctttttttttgagatggagtctcgctctgtcacccaggctagagtgcagtggcgtgatctcggctcactgcaaggtccacctcccgggttcacgccattctcctgcctcagcctcccacatagctgggactacaggcgcccgccaccatgccccgcgaattttttgaatttttagtagacacagggtttcactgtgttagccaggatggtcttgatttcctgacctcgtgatccgcccacctcggcctcccaaagtgctgggattacaggcgtgagccaccgtgccctgccctggattgttatttttttaaacataagtagctttttaaaaattataaaagtaaaaatgctcattttataaaaattaaggaagctcagggaatataagtaaaaatacaaaaaaaaattttagtttcaccattcagagataaccccaggcaacattgttacatatccttctagattaatttctgtgcatatatatatgtgtatacacacacacacatacacacacacacacatatatttatgtctacatctccaaatatgttaaaccgtatgtacattctgtcttgtaacatgatttaattttttttttttttgagacggagtcttggtctgtcacccaggctggagtgcaatggcgtgatcttggctcactgcaagctccgcctcccgggttcaagtgagtctcctgtctcagcctcctgagtagctgagactacaggcgtccgccaccacgcccggctaatttgtgtgtttttagtagagatgggatttcaccatattggccaggctggccttgaactcctgacctcaggtgatccacaggcttcagcctcccaaagtgctgggattataggcatgagccactgtgcctggccatgatttaagttttttaacttatattaataatcttccatggtgcataactgcacactagattcagtttattcatccattattcagtttacttaacaaatatttactgcacactttttgtgtgccaggcagtttttctagctcttgggggctatagcgctgaagaggagtgctgaacaggagcctgctctctgtctcttcctccccacctatgctgaactctcaggtcatgctggatattcagtactggatactcatagagctcagcatctaggtggggagggagggacaataagtcaggaattatgtatgcatagatacctctaggtattgatgtgtacgctgaaggatataaaataggataccacaaggaagagtgagcagtgtgtggttgtggtgcgggatttgggggagggaggcaagcagggaattgtccccctttctaggtgatgagtagaggccttcctgaggaagtgagtgttaatttgaatgatgagaagagtcaggggaaggtgattccccatgataggaatgacaagtgccagggcccttggtggatcaagcttggtgcatgtgaggaatggaagaaggccctggaggagactggaagccggtgaccaaaggagagacgtgtatgtgaagagtgtggaaggggatgcaggacagagagtggggtgtgcttataaggagaatccactagacggttttaaactggggagtgacatgatctgatggctgtttttgaaaggttctgctttgtgcggagtggattggtggggagcaagactggaaacaagaggaccacttcagaggctcttatagcagttcaggcaaaagaggttggtgcgcttaatttgggggtggcaatgaggatgatgggtgttttttccttcggcatgcatttgaaggtgtagcagctggtagtacatggggagtgggtagaggccgatagggaaggaaaggaatgactcaagggtgactgctaggtttttttgcttgaataaattagctatattttgagagggtgtaggttaggggaagaacaaatttaggagggttatgaatcaatcagttttggacatagttcaagacacctatgagacttccaggtgacaagttgtacgtatatctggagaaaagtcaggtagaaagtggcatataaatctgggaggaaggaagggtaagataaatttttaaattaccacatatagattttaattaacatgattgagaaattattaagagtacagaaagagagaagtgggctggaatgcatgcagagatgtcatcttctttactcaatcccaaattgatgaacattcaggttatttcatttaaattataagtgcatttagtgaacacacctttgaaatcttgtctgatatctcctgaggagaatttcctagaagtagatcataagttgcatgtgaagtgcttgaatggagcctaccacatagtgagctcttgataaatatttgtagccttggtttatcttcatcattcttactgttattgagtgaaaggctttcaattggaaagacaacataatggctcacaattcagactctagagtcataattgcaagtctaggttcaaattctggctttgctccttacgagccacaatactttggataagtcacttaatctatttcctcatgcatgccatgtgaaaaataccaaacctctttggagggttgagagagtacaggttaagtgcttgggcctccctggagcatgtggcctgtggctttacacaactacaggttgggttccaatttctccacattgtccagggtagtatctagtatcattcttattaaccttttccaatcagtagaaatatggtttcacgtcattttcatgtttattgcctatttatatttcttagtatgtgagttgcatatttttatttctattgaaggtattcatcttgctttagcatcttttttagccatttgtatatcctaagtatagtgacacttgtcatatttgttgcacatattttttcccagggaaaaaatcttcattgtgctcagtttggtgagaaagatggttttataaatcattgctatataatattatatgtagtaatgtaagcatatgcattacgacctgagaacactggggaaggttggatttggaacagtgtgcactgaaatttgaaggacgagttgatatttgttaaagggacaaggaagagtggagtgggaaggacattccaggtagatgatctgtctgtgcgggaacactgaggcaccacagagcctgacatgtttacacatttggtggaacttaagcacggggccactgtgaggaggtgcacagagatggcactggggacttaggctggcatgaaaaagctagagcctcatgccctgttcaacttgggacctttccctgtaggccagggagagccatggaggattctaggcatacaaaactgaatttgtgctatgggaggatcagaagtcctgagaccggttagaagcattgcatttgtgcaggctgagggaaagaggccccaactaggcccgactctggaggtttgtccttatttacctggtaaagttgagggagtggcacaagtggtagtcataactagaggcatcatgctgcctctaccgtcttctatcatgtcctttttataaagcttctgattaaacttacataataaaaaaggatgtgttatttaaagctctcaaacacagatttattgatgccttaccctcaagttgctaaacgttcaagtgtccccacatgtgggtacttcttctatgaaataggtagtagctggcacttacggtgagatgggatttactagagtaagatttacattgagcaagaatttatgatgacttgggcagtaataaaaccaacaatcataatttatgtttcatgttaatactttgatattagattatctacttatttttcaaactaaaatgaatcctccaattttaataccactggaggacacgattttagacattatgtgtctgataaagtgagaagacaaaaaagtagtccttcttaatatttttatggccatcttacaatattggcccagcttattaacctttttttgtggttttcccgtgtgttgctgctaaatcatatctcctcccatctgtatttgttcattttctgtgtgttattgttatcaacattatcatttcattttggaccctgacatccatgctgaatttattttattggatttatttattagaatcctattattacaccctgtatatttgctattttgcccatttttttccatccacagataagttggatatgattcctatatcttcatgcaactcattaatgaagataccaagaaaaacagaagtttttgatatctgtctatatcacttttgtccaggttgacatcatcctatgaattagcactctgagtaaggttgatcatgtgataaaagcagcctcttcactctgtttacacagcttgaatttctttaccttgctaatactcatctttcatgtattagaaaagattttgttcaaacagagatacattttgttgtttctgatccttgcttttcccagtacaacagcttatcaagtcgaggctaaggatgggctgacgtgcatgggtctgaggttttctaggattcctttcttagtactgttgatcatcttatccaggatcagttatcaagctcacaggcctctgtgtctgtaggattttatttcttaacaagaatgcccctttctgaaatagctttgccaaatatcagttattttaggtgctgttatgtttttcatatgctgttccactcttacatagaagatgtttcacctgcttagatgttgtagaccgtggtctgaagccagagctaaaggctttattttagttgttgttttgagaagcataatctaagatgatgcttaagattttgatatctggggttaaataatgtcataaagaaaaaaattttgaattattttggagtggaaagcttcagattctgaccctaaagaatgttaagaaagcattcaggcacattttggtcaacatctgtgcattgaaatctaggtcttaaaacagtttatattttaagattatttcagcagcaagacaagaattttttaatgccagtacattttgtgacaggttaactggctccctaagaactatatttggcttgcaaatgtattttgtttggcccacatagtgttttttttttaattggaattaattgccagcatttaaaaataaggatatttcataataataataataaaaaaaactaaaaaagcaacaacctggatttcctgcccttttggaaaaactggaagatctgtggctgtactggccgctcgtcctctgtggtgtaatacagacacaaggagctggcgaggggctgcccgccagcctgtgtcatgtgaatggctccagtcatttcatctggctggctcttggagtatgtttgagtttgcacctgctgagttgagagcttaaccaattaaaagtgtacttagagttggaaggagaacagtaagatggcagttattttccatttgttctctgaacatagactgtctgatctttgttataatgtgattagtggaagtgcttggtagagcaggtggtgtttcccccagcaacagtattcaccggacaggtcgggggagagctgaatttctaatcacattgtacatctaccagtttgttcctgcaggtgacaaacaaggttttctgaaaacaaaacaaccgtaagtttcttatgatacttaaagtagggaaagcaggtgctgggtcttagttgtgtaatttgagagctaagacctgagatgttaggtgatttatctgcgagcccctacctgtcacctattcagtggtagaatagggactggagtccaggactcctgactccagcttagttgctcattttacagtttagtataatggcctggagctgagatttgcagtcagagttggctacagatcccactttgctccttactagctgtatgacctttctgtgcctcagttttcttattataaaaagagggaaataatatgaataataccgaccttataggattgatatgaaaattaaatccaatttttcattgaaagaacttagaaaagtggctgctccttaataaacagtatttaaataatgcataatatctgaaatatatgtataaattatattttacatggtagagttagctaaaaccagcttgttacctagatagaattattgtgtaattagtatttttccccctcctagaatttagaaaggcctttagggatagttttactctatgtattaccccccccaaaaaaccaaaaaaacttcaatttgagccagtattctttttattaatgaatttttgtatagcaaacaggttcattgaaaagcataaagtttgtcagcttactcttcagaatgtagacaaataactgaatggtatgaaaatattttaagtcctcaccgaggactctatttgaatggatttgcttcagtcaccaaataaatcttgtacgtgtggtggatataaagcactcctagactatggattttacaaagataaggctctgatcttagcttatagtggaaaagagggtggaaggaagggagagaatgatttccataatacctggtatgataagaacaatgcctaaaggggaaattgatgtccagtgggagcataaacagagcactgtgtctggttggacatagtggtcagcatgagaaccaagaggaaggccgggcgcggtggctcacacctgtaatcccagcactttgggaggccgaggcaggcggatcactaggtcaggagatcgagaccacggtgaaaccccgtctctcctaaaaaatacaaaaaattagccaggcacagtggcaggcgcctgtagtcccagctactcgggaggctgaggcaggagaatggcgtgaacacgggaggcagagcttgcagtgagccgagatcgcgccactgcactccagcctgggtgacagagcgagactccgtctcaaaaaaaaaagagagaaccaagaggaagagatgcccctaggaaaggagtagaggaggtggaagaagattgcggaatagacgtgtgaattttagtgtggacggttgtctgagctgttggtgggccagccttctgatatttggcctggagcttcaaagaatgatagggttagtgatatagatgctatttaaagctttgcaactcactatggaagatggattgtgtgaggcccttgccagagggttgtaaattacgtatgccagagagtgaggagggcctcagcctccagagcagtagaaatggactggagggagaggatggggaaagagtcaaggcatgttttaggtaaaagtggcaagtcaggtgggaggtgtgaggaagaaggaagagtcagggttactcagaagacactggtgccatgggctaagacggggctacaagagagcaggtttggaggggaaagtgagcttaattcagtacatctggagtttttgaggaatctgaaatatccaagtggatatgaagcatcagaatattttgtcatgcctgaaggaaccttacttgagtggatttgtctaagtaagcaagaaattgtctagtgaatggttaatctgtaactgggaagaggccaatcctgggaacacggatttggaagtaattagcatacaagtgatgttatagccacaagcacagataatactgttcagtcaggaagtgaaggatagaaggagcagtaggctaaggagtcccaccaaggaagctaagtaggaatagaatctgaatggcatctcaagtcagtgagagaaggaatggattacctaataagtggtgttgggataagtggtaaccacttagagggaaacagaaaaggtgggtccttgactcaactgtacactgaaattaattttatatggcatgaagcttaaaatgtgaaacaccttaaatgtacttgaaggcaacatcaggacaatttgcatagtcccggcatgagaaaaacctttatggttagaaaccacaaaggacaaaatagagaaatctgatctagtaagagttaaacaaaagactcactggaaagtaaaagcgattggggaatctatttgctatgtatgtaacagagttaatatgcatattaagattttttttcttagcaatcattaaggaaatgattaatgcccaattagaaaaaggagcaaaagagaataaacagcttataaataaagcattgcaaattatcaataaacatatgaaaggatattttaattacgcaataaaaagaaatgccatttatggcccaacagaataattttttttttttaaagacaatccttggtattagtgagaagtactgggaaatggagatgttcctgtttctttttagagataagttttcgtcatgttttcctgcatgttaaagatttattggaggaatgttcttcaggttgtttaataatagagcacttcatcgttaaaagggaagaaacaagttcattcgtttggtagacttttatatttattgaagactgttacataccagtcactcttatagcgtagttgaagtgggatatgagtagtcagatgttactctaaagtatgatagcgtgagtcccgaaagatggaagaatgggaaatataggagacattgcagggggcactccattggaggcagtggttttgggagaggccttgagaccaaagggaatgtggagtgtttggggagctgctgcggtatggagaggaaggggttcatggccgtctcgaagggctgtgcccacagtatggaactggaactgtgtgttgaaacagtggagagcctttggaggattttaagcatggaagtgatgtattcaaacttgttttgacatgctgaggttcataatggactggctcttgaattaacagggaagtccacactgcaatggagattactaaaactgacatggaggatcctgaaaaagaaaaactttggaagacagtctatttttaaaagttcccaggaaatgcaaaggaattaagaaaaaaaaattgacaagattattctatttgaataatagaccaaaaagttattttggggaatgaatatcctgcattatgcacagtgatagatttgtctttataatgtagcaaatgttaaatttcaatattattttcctacatgcagaacgcatattgaagtatgatacagtggaatccctaagcagccaagctatcctctaactcaggtccccagactgtcatagttcacagtgcccgtcgtgttttgttaatgttttttatgatgcttgtagtcaaaagaattacctaacagttctctttatgaaatagctgggtccaaacaatttaatgagtatttatgatcaagcactttagtagcagtttgaagaaataacgtgtatccacttaaaaggaaaaatataattgtccctctatctctgtgggggcacgttccaagaccttcacagatgtgaaaatctttggatgccaagtccctaatataaaatggtgtggtatttgtatataacctgtgcttatcctctcatatgatttaaatcatctctagattactttaaatcatccctaatacagtgttaatgctatgtaagcagttgttaaacggtacttttttttttactgtttttttattgttgtactgttgtcttttattggttttgttttctgaatattttcaatccaaggttggttgaatctgtggttgcagaaccctgggatatgaagggtctatggtagtatttttatttcattcttaaaaagccttaattactgatgagatgtgtgaagctattgagtactgcatagcttcccaaatcttggaaaccagcaccctcatttccatttctacattgatttgtttgggtagtacttgtgttttatcccagcaattactagtccctccctctcttcaccaaagataaagatacgatgtcacacaaaaaaatgtagcatgagcaaatattgaaactgtggactaccttgaactaacggttttcagagtgttggacagatgtcactttatttccttcaaaaacttagatattctgtgatagctctgtcagtttgctttggtgtcttggggtgcctcagtgcagtttgggagccagagctttaacttgggttcctagtgttggcagtacctgggttagcatgcagcctaacaatgaaagtatactgtgtgggcatataataatttgtgccttggtattcattcagccagctggcttagagtttttggtgtctgctttgtgccaggtactgcttggacactgagggttacagtgaactcggatgtgtttgctctcaaggatctgacggtctgtagggagaattataagattaggaagtgaagcagtagagcagaagtcagcaaactctttctgtaaagggccaggcagtaaatattttaggctttgtggaccattcaatctctatcctagccactcagctctaacattgtcatgggaaagtagtcataggttatacttaaactagtgggcgtggctgtgttctaggaagatttacaaaatcaagaggcgggtaagatttggcctatggaacatgaattgtgcaaccccatgacataaatataattaaagtgttgtggaagcagcagcagatggcatctaacctgtggactctcagaggcaatgacaaacatacctcctgctaggagcatcactgctgacttgaggagggtgcagatgaaattagcaagaagggaaaaagggtgctggcctaaggagtcctgaagggtctggcagctgtggaatggcagccattttagtgtggcccggacacacagcagaggcagtgtgcaaggcctctttctaggttctgactccagttgtatggattgtatattttctctcttgttcttttttgttttgtacctcattttggtcagtcatgtcctgcagtagcttccagagaatgggtacacggaaggtgatacatcttttgacattttgcatgtctttgtaaaatatatgttatccactcaacagtttgagtatagaattcaagtgtgaaaataattttcacttgtattttggaaggtgttctttttagcttttattgctaaaaagtctggtgtgttcctccccttctcaagaatatttatgggtcacacacccagtgtctcatgtacacccgtaacctgctctggaggtggtgctgtcaccatccctgtgttacaatgggggtttgtccacactcacaccgcaagtcacagaggcctgacttgactaatttattctgatgttgttcttattcctgagcccttgtgtatggcctccactccctggaaacttgtaacatctttgatacagatattttgatattctcagtgatgcatcttggtatcagtcttttcagattccttgtgctgggttatgtgggctctttgaggactagatttttgctaggactagacctatatactgataaattttgcatacatctttgttactgcagctatgtcctagttaatctccttgaaacatcactttgttccagcttccctctttctgaaaagctattcatgccttcctgtgcagtctagtcttcccagatagaacttctcagtctggccaagtgtatgtttttcgtaagtatttctttcttttaacttgaagagcccctacacttcacttcaataacacaatggagtctaccaaactgcagagtttatgatcctgaaaagccttcttcactgggagctaatgctggaggaatttaagatcttgtgggagggaaatgggataaggaaaatagttgctggtcaaagtttttaaacaatgttgatgtttcctcctaggaaacagtaaagaaagggacactaggaagaatacaaatgagcagtgcgggtactgtttactgcctgtgtgattgcacttgttttgctcaactcccagcatctccactcctgtggatgggtgacccactcgtaggcttatttacctttacagtagttcagagtcttttctccctcgagtgttccagcttagtatttaatttcttttgagaattaatgacaagggagtcatcttattgtatggcaaaaagatagattcttgagataaaagatgctttgggctgtcttgattcctttcaccctgactgtgcaggtgttgcctgaggcctccttctgcacacaaggctggaggcctcagtgccaccaggctaggttcgtgccagcaggacatgctaactcactctctgtcacgtttcctgatctgtctctacctacctgtccccaccaccgccaccatatttatgtatatagagaggggttgggggacaggggaacagagacaaaataagcaacaaaatgtgttgggactagtttctggtatttagctttacttttctcaactctttttttctaattttcttcggcagaaaagccctaaacctcatgtacactggaaccagaattctcaaggttgagaaaaatacaagtcaaagtacatgtgtgaacactcatcttcacaaacaaggcctttaaaagctcaggggcccgtgttgacaggactgaactttgccatgtggggccccaggctcaagttctgcctgtgctttatgatggtctaagattgaagtcagcatatgtgtaaagaaatagaaccagatatttttctttccattcaacagtcttacagatttattctgcatgattacttttctttagcagaagggtttattgactttttaagtcctttaaaataattagtataggaaacaaactggtcacccttgggcaggaaggatactgcccatgagcatattttgtctggcctttagaatgtgtaaaacatatgcattattttctcacatttacaaactttggtgtttcatttaaaatgccagatttctacctcatctggaaaaatcagcatatttggcaaaatgaggctggtggctgccacttttatgctaggcagaggggctgcagtttgcacctgctgtgaacacgtttgttacttgctttgcccctgcatatttgcatttgcaccctgttgctgcatcctaattttgaaagttagctcctgaaatcgtataaaaatttgtgctcctctaaggaataaggcattgacaggggaaaaaagtgaattctgacaatgtttctatcaggagtgagcagagaaaagcttcacaagcatcactttttttctgaaagtacttcggaaggctctgttcatgtattgttctggcccacagtaagtccatttgaaagttttgcttggtggggaagtctgatgtgttataagcacaatattgtattgcccaaatagacttgcccagaattctctgtgtaaatgtatcacaccagaaagtcttctttattatcctgcttaagttaagcaggcttcagtgacactgccgttgatccttctgtccctgggcatcgccttcctcctgcttactgacctcctcagcagagtctttgatccgtggctgttgctggcataggctttgtgcgagctcgctactgtctgcgtgcctgttccctgccagcaggaatggaatattacagcttcgctttgggaagtctcttatgtggatcctgaatagagagcatgcctctctgctccaatggttgaggctgaagcagggagggattaagtgatttaccctcagccataccactaattagtaatggagccaagattagcatctaaatctggaagcacctggtccagagctctttctcagctgcctccctccgccccttcttgcacttcttcctggcatggctgtagggcctgtgtctctttttagaataatcgaaacttgtagtgagggactgtttcatttcaagataatgtttagccagtcagtgaatatggtttatgattattttagtcagagtttgagttttagggtcatgtttggctccattactcagttattcttgtacagttgtataattctataaattcagcaactggcattttagatattttgtgaatacattttcattctactaagtaaactcaatgaccctggaattgactaggaagttattcattcatccagaaaataatagaacacttttgaaatgtgtgctcacgccttttgcatgttatggttataattaagctatttgggattcatttcctgggtttttgacagtacttgacagtagccgagaagagatcttgccatctgctttcactaagaaaaatattttttcgaattctctcaatgggctccagttatttaggtgttggatctcctttcctttatcaagtcttcatttcttatctcttttcccacattttcaatttttttttgtattttgttctgaaagattactcaatctttttcttattttaattttaatatcagacaatatgtttaacttctaagagctatttttatttcctgttattcctttttcattgcatcctctagttttttatagttatgccatgtttgctcagaggacactatttagagttttttaggttctttttttttcttttaagttttcttgtttcctatatcatccccattttctctggaagtactttttattttccttttggttatcctaaatttctctttaatattttagcctttgcttatatgttttgtgatctttggtgccctgtgccaatgttgtaataaatgaggcaattttaggtctgacacaagagttttcagtgtatcataaggatcttgttggctggtggtgtccctctaggaagaaaggatgaagggtggatgggaatttcattactctgggggatccctaaatgtccaatgtgcaacatctccatactgttaccctagttttttctttttaaattattaaatttgtatgaaatagaaactttccaacaccatgtaaatgggagacaaaactaatataacttgtcataaatgactaaacacaagttaacgtactaataaaatacataaaaatatcaatccaggtatcacttaaaattgtcaaaaattcagtctcatgcactgcttttctacattttagtagagttggagtagagttgatagccatgtgcttataattttgttgtaattttataattatagttatgatctttaacttgaagcccatcatttgaaaattggcctcgtagtagatacctaaagcaacagctgtgtccaattattgatgtctccacaagccagggaagcttgagtttgagtatctccaaagtctctaaatgtacagtgtttcagaatctgtcagaatctatttgagtgtttgtgtgcacagtataaggtgagccttcagaacaatctgaacaccatctggaattcctctcctaacctaggactgactgcattgcacagatgatggatatttacgtatgtttgaaacgaccatcctggatggtggacaataaaagaatgaggactgcttcaaatttccagtggctgttatcaacatttattcttctatatctaatgaatcaagtaaatagccagaaaaagggtaagtgcatcagccttccagagaatgaacagattgcagttttatttccattttgatgacgaagcaattttgttgctttattgacccctttaggattttgttggttaaaattcatttttttgtcatcttttttctatgtacttttagtttcttttaaaaagatccttaatgatagatcaaaatattattttaccatgaaaaattaaaatataatttacatacaataaaatttgcctttttaagattcagttctgtgagttttgacaatgaatgtagttatgtaaccaccagcacaatcaagatagggaacagccccggcactgcaaaagcttcctggctcctctgtagtcagccctcccaggcccatcccctgccagcactgccttgtctccatagacactgttttctgtctctataatgttacctttttagaatgtcatatcaatgaaatccaaatatttttaaatgtattatgttacatcttaaatatattaagaatgtttatgtagatattttatagcttatttatataaagaaattatcatcctcctgcccgttggtttagtttttatattatttccatatttaaatagatctcttttctccaaggtcattcattaaattactttattattatgattagtgctgctttataatgtgagtacttttaatgtaatatttgtttttctgtcatataaatagccgtataatttattgctacagtgaatatcgtaccaaccatgtacaaaaacaaaaacatttttcataaacatttatagaatctgagatggactaccttttttattctatagttgccttttccccttgtttccctcctttcttccctctttccctctctcttataccccccttctttttactcattttcttttcggggtgacttttttcattgcatagtgcttacatattccatggtgtaatgttattttatagatgtgagtaagtactagtaggattgtaatcttctgaattgttactttcaattgtttaggcccacaccaaaaatatatttctcaaatgaactcatgagtttattactgtttaaatttaatatacttcataataacctaaagattagttatgggagttctaccaagggggcagtctggtagcaagcaatgaggtgggggtgactaggagtttcaaagttttgtttaaaaacttggaaggcacatcatttttacttaagacttctttgtttttgttttttgttttttccttaagtggggctattgaagattcaagaggtgctagaatcccctcaagccctctcttggtcccattattgaatctacatgactagccactcactcccttaatttgtcttagttgcttggaagtggaatttttgatagcagcctaaccccaaaatggtctagtagctggcccactttcatcagtttaccctttagttgtttttttttaaccaaagctgcaaaaagaaatagaaaaccagtccactcccatgacttgcaggatcatctctttgaaaaaaaaaaaaacatgggctctctgcagacacacatgcttgtgcttacaactgaaaatggttgactttttagagtgcagttgacttattcagcatattctgtgtttatgtgtgtctgtgtgtgtgtgtgtgtgtgtgtgtgtgtctcctccaggggctcctcatgatttgaagtgtgtaactaacaatttgcaagtgtggaactgttcttggaaagcaccctctggaacaggccgtggtactgattatgaagtttgcattgaaaacaggtaattttaatttactttaattcacaatgagctaggttgaattgcagaaacgaccctcagttcttaccttattgcttgtgaaactaaagggttatttcctgcttgtgttctgtgtccagcagagtctgccgtgacctctgcctcatttttctcctgtagggcaccaagcattatgaggtgtgatggcaaggtgagaagaggggacagagtctgcagtggctttcagtgcagatctggtagataagactgtcactcagatttctgccaccaaataaagccacatggccataccttgcttcagagaggcagggaaggacggtcttagtgtgagtccagaagggggagcctgaaaagtttgctgaagagcacacatgcccaccacaggccaaacagagaggaagttagttctggccccctgctcccctgggaggtcacaataaacaaatagtagcaaggctgtggtttttgtgcaagggagtggacactaggagtatgaatgtctagaaaggctgtcagaggaggtgtaattctggagtaggcacagtcagttttctcagcagaaaaggaataggaggacattctaccctgaaagaatattgagtacaatggcttgaatgtatgagatggcgtgatttggagaattcaggtgtttttgcattgctgatgcctaaagaagcctcaccatgtgagaggtttagaaggagatgagctggacccattcaagtccagagtcctaagcacccagccctaaggctggggctgggtagttggtgggggcaggaatgcaagaggcatggaaagtcctttcagtaaagtaaacatttgtataagaagtttgaaacatatatgaacaacagtataaggaatataagcatgctctggagagatatcaagggctgtggaacaagagaggaaaatatcattttgcctaagagataccaggggaactggaagcattttgaaaacagaactgaagaggaagttctgttaagaagaaaccatgagccaaggcagaggagcaggggagttgccagtttcatttccttcatcagcatccgttgaacatcatcctagcatgaggagcgctgtgatgcactggtccctcagtgaaggggtggagtgtgagtagtggaagtcagcctacaaagggaaggttgaggtgggattttgaaaggcatgcaaaaactccagctgtttggagtcatctatgcttattctacttttggtacaatgaggttgtttttcctacccccacattggtaaagttactatcaatctgttttttcagtcttaaaatgcggtacaacctatcatgtttttgcaacaaagagggcataaagtattttccattgtattttgtgttaaccaaatttttatgaaaattatactattaattttatttgctaattaaaattcaatttcttattacaggtcccgttcttgttatcagttggagaaaaccagtattaaaattccagctctttcacatggtgattatgaaataacaataaattctctacatgattttggaagttctacaagtaaattcacactaaatgaacaaaacgtttgtaagtatttgaaaacaaactcaattttaaagtaagtcaagtgtcacttgttagtattgtggtgctttctagttttttgaatttcatgtgttatgctattacttttaattcactcagcaacctccctatgaattgtagatggtagccaagatcagaaggaagcaaacttttcttctggccagtcaaaatagcccagaattcaggctccttccctcagttccatactctttctttagcccccttgactcctgcgtaccttccagaatttctcagatgccccttgctctagggtgtagtcttatctgggaagctactgaaaaatgacagtattagaatcagaaaggcaaatcaagacagactgtaggagactcagtcgattaatagttcattgtgttttacatatcatgtaatgtattggtagcattataaataataatggtcctgatcatgattagaataacagtattgggataagaaaattgaaaagcaaattaggtgagtgtaaggaacggaggagatggatacatcagcaaatctttgagcacctactgtgtgcaagagaagctctgcaatgcatgtatagctgtcctttagaggatctggatctcttgacaatttgctactaaataaaagtatgaaaattaagtgtctgtggatctaaagatgctttctaaattatataaagcaaacaagattttatatatatatatatacacacacacacacacacacacacacagtaaagtttgtacttaccatgtgtaagcatgaaaaattcttcataagatttttaatttctgcatttcttaaaatcacctgaaaatttgggtcattctgaagcagaatgtgggtcctgtaaaaaaaagctgggaatactcttatcttcttatgtcctaaggaagcaggagcacgtagattatgggtaaagctgaattagcattagaagaaaataaaaaagattttcattaaatttcttccctatctgagtttctagaaagcaagttaacattgtcctcacatgtctgtttagcacaaagaaatgcagatggcagttaatgggagcttaggggaaacttccctatatgctataaagaaaagaaagggagcagtggctttttaaaatccttgtacttgtaattatggccattactgtctttagcttgaaatgttggatattacttgtatttttaagagtagcccactgctatttaaataaaatgtaaattatgtggacttttcagggagggaagcattttaaagatgagcgttgtcttagtaaaatactcccgtgtttcataaattgtaagttactacatcatgtgacatcctgaatcatttgaaagaatagctgtgttcttggaagcctcttgctcttttctggtcacactggcaccctgagctttccctgtcctggcactaaatcaacttcttgcctctcgtttgtctgcatttttccttttccacaaggagctgcccacttaaaacttctttttaaagcatcctccactgtccttatacagctgtgtaactgttgactttgctctgtagtttagactgtaaatccacatgttctgtgtcctgtacagccctaaacactttacataaatccagtgttgaacactgtattggccaaattttagttaaacctatttttaataactatttttaagttccgagattaatgtgtattggtttgttctgccctttttgttatttagcatattcagctaccctagccctgcactgtcctgcagttttgggcttaccatgactatatgtaattggtccttgagcttctaggatagaaatgaggcaagaaagggtgagtctatggatttcttctaactcacctttactttactgttatttgaggaggaaacatggaagaaagtccaagtctctctgattctcaaaccagaaagtctacatttcatagaatggaacatgctcataccttctttgttttccattggtccaaaattttccatgatttatccgcccttagggagagttaatgattttcaaggatacattactcttcctgctaccttttttagtgtcctggattctccctaggagatgcccaaacctttgagcatggatttttttctcttttaccttttgtaatgcagcttcagagcccactgttctcctaaacttctttctcagatattaacagtagcctcgccagtggtttttccacagtcttcctctataaactgttttatttggcacaggtaacaactatttgtttttatttcgatgatcctggattttctctggtttccttctgcttctaggattccctctctggattcatgttggtgtttttggctccttgaagatgtaattgtctattggcagcccctaaaaggagctttggctggtttatgtctttgtgttcatgctcttttctaccactacactcaatcagttccttttaagtctgcatccacgttctgactccatggtgtcttcttcccctgacccttactcatccatagccaggcttctgtgtctcttcacagtgattcccgattccttttgctcctcttgctgctttctgagctagaaacttgagagaatattggttgtttccctttttcattagaaccaaccgtttatttctttgatgtagtcatttctttgaaatatccatgacatcttttccatagatggcatcttagtttatatccttgtcactctagccaggattgctccagtggtctcctaattggtcaccttatcccctgtctcaatcccccgcagtctgtgttgcatactactgataaaggaacctttctgacacacttcttatatcctgctacttctgcacagtaaccactggcttcttaactcaatgccttagtcactgagacaatcctgctactgtttaatggtattgaaaatcagtaatgcccatagcatttctcaagtgggtgacatcccccagcacgagagactcttgacaccaggagatgcctgagacagctgcagagaaaacagagagaagcctttaccaaaggaagctttctatattttgttattttcttagggctgccctacagccatacagaggaaactcgttttcttctctctgatgttgcctacctgtaggttcctgactaaatgacactagagtactgtggaaacctagttgctgtttgtattagaaaatgtgctgtggatttgaaacagccagctaataaataattttcttaaatttggctgatgaagcattgggagctgcctctacaaataaataatatatatgttcccctttttcagaaatttgagagaatattagtcgtttccctttctcattagaaccaacccttcatttctttgatccagtcatttctttgaaatatccatgacattttatcttttccatatatggcatctcagtccatgtccttattactgggttctagagtttccttttaaatcttgattattgattttttgatcaagaaggaatagagtttataagtagttgattagtggagttacagtatgaaaaatcattacttattttactaagttttctcttttgtttcctctttttaaagccttaattccagatactccagagatcttgaatttgtctgctgatttctcaacctctacattatacctaaagtggaacgacaggggttcagtttttccacaccgctcaaatgttatctgggaaattaaagttctacgtaaagagagtatggagctcgtaaaattagtaagtttgaacatagattttcttcctatgacattaaagaaactgaataattttttttaagaagccttaaggtggtatcagtgaacttttggattatttaggaagtaaatcagatacctttcagggttcattaaaaacatcatgcatgatttaaaaatcacttgttaattattaaatgatgtgtaaccattacagatagcataggaaattaggggagaaataagccgtgattctaccacttgaaaatagtaagtactgtttttgtgtattcctgtctggacttgtttatatgcatgtttttatgtaaatgaaagtgcacatttaatttagtgtattattttacctttgtctaatgttttgaagcatgtttagccagaacttagccatagagaatttttttttataaatctataagcttgaatttatcagtacatgctttttccctctctcgttttttcattcctgtttatgaatggcctctaaggagtaatgaacaacatttatgaaaagtttgacagctgttacctggaaatgctccctttcagccttttactctttttcttgatagatttggagtttgcttagttacaggtttaagaattagaagaccatctcatgattttacagtttatttgttcaagttgctcaagtacatagataaaatagtaaagataataaaaaagattattctatatttcatactttcttattgtttctctttgacaacccatgtatttcattcctaaaataacaatagtcagctagcacctagcctatatgggacaatagcctattgcttctaggccacatacaaacctgcatggcatgttactgtactgaataatggaggcaattgtaatatattggtaagtatttctgtatctaaatatagaaaagatatgtaaaaatatggtatagaagactttaaatggaggagggacttcaagatggctgactagaggcacctcgtactcaacttctctacaaagaagaaccaagatagggaatagtagatcttcacacttcaaatagatcatcctagagagagcatcgggattcaagagaagtgacaggaagcacctaaagcagggaaggaagaggaaagtgaggcagccagcagaacaccagcagtggctccactgctaaagtgcattccatgtgcccagagtcccctgcctgcaactgctgaagcacaagtggggcgtgatgtgccaccactaaggctgaagcgtgagtgaagcgcagactacagctactgagactagaatgcaaattgtgcgttccccacttgcatgcctatggctaccattgaaagcaatctcttcctcctcagtagcagggccgcagcacagccactgctgctgtccacctgagcattctggagggagcatggggaacaccgcatgcctgcctaccacagctagtgtctacatgtactacgagagggcctgaggacaagcccacccagctttgttcccttgccctggtgccagaacttacagcctatggacctaggaatcacctagcctagtctaccaccatcagcacctgagcacctcttctaggggcctgagattaggcccacacaccctgctgctaccaccacagctggcacctactgcacatgctacctgcgggcctgaagactggcccactcagcacattgtatctactgtcagcaccagagtgcactgctcaagacccagagggttatcctaccactgctactgccatcacccacaccacacctgctggccaggggcctgagaacgtacccagcccaccactctcaataccagcatccaagcaagccacctggacgctcaagaattggcccccttggacccactaacaatggggccagtgaatgccatcctggggtccaaagacaggcatactcggcttaccacttccactgccgggacccaaagactggaccacttacgccactcttattcaacaatagtactggaagtcctagccagagcagtcgggcaagagagaaaataaaagggatccaaattgggaaagagagagtcaaattgtccctctttgctggtgatataatcttgtatctagaaaagtgtaaagactcccccaaaaaacttagatctgtaaataaagttagtaaagttgcaggaggtaaaatcaatatagaaaaatgagaagtgtttctatatgctaataatgaactggctgaaaaatcaagaaagccatcccatttacaatagctacagaaaaataaagtacctaggaataaatttaaccaagtagttggaagatctctataaggaaaactacaaaactgatgaaagaaattgaagaggacacaaagacattccatgcttacagattggaagaattaatatcattaacaggaccaaactgcccaaagcaatctgcacatttagattcaatgcattccctacaaaaatgccaatgtcattttccacagaaatagaaaaaacaatcctaaaatttgtatgaagtcaaaagaaacccaaatagctgaagcagtcctgagtaaaagaacaaacttggagacatcacactactcaacttcaaaatatattaaaaggttatctatagtaatcaaaacagcatgttacttgtataaaaacagatacatagaccagtggaacagagtagagaatccagaaataactatgtttttatagcaaacttatctttgacaaaggtaccaagaacatacatagttggggaaaggatatcatcttcaataaatggtactgggaaaattggatattcatatgcagaagaatgaaactggatctctgtctctcatatacaaaaatcaactcaagatagatgaaagacttaaacataagactgaaactataaaacatggggaaaatactataggacattggtccaggtaaagattttatggctaaaactgcaaaagcacagacagcagaagcaaaaatagattatattaaactaaaaagcttctgcacaacagtggaaacagtggagtgaagagacggttgaatgggagaaaacatttccaaactattcatccaacaaaggacgaatatccagaacctaccgtgaactaaaacaactcaacaattaaaaaattaatactcccattgtaatgtgggcaaaggacatgaatagacatttctcaaaagaagacatatggacaacaggtgtatgaaaaaatgctcaatatcactacttaccagggaaatacaaattaaaaccacaatcaaatcagctcacctctattagaatggctattattaaaaagacaaaaaaaacttatatattggtgaggatgtggagcatgggaagctcttatacaatgcgactgggaatgtaaattagtacaactactatggaaatcggtatggagatttctcaaaaaactaaaaagagaactcctataggatccagcagtcccacttctgggtatctgtccaaaggaaaataaatcagtgtattaaagggttacctgaattcacatgtttatcatgccactattcacaatagaaaatatgtggaatcaacctaagtgtccagtagatgagtggataaagaaaatgtgatatatacacacaatggaattctgtttggccataaaaaagaatgaaatcatgtcatcttcagcaaccaggatggaactggaggccactacgctaagcgaaataagccaggcacagaaagataaatatagtatgttctcactcactcatggagactaaaaaagctgatctcatggaggtaaagatattattagtaacagaatgatagatactagagactgagaagggtgtgttggtgggacggggcaggaagagaggttggtgaatgggtacaaatgtacagttagatagaagatataagttctgtgttagatagtcaagtagggtgactgtagttagcatccatgtattatatatttcaaggtagctagaagacttgaaatgttcccaacacagaaatgataatactcatgagataatggataccccaaataccctgacttgatcattacacattctgtgcatgtaaccaatactcacatgtatcccataaatactatgtatcaataaaatgtttaaagagataaaaaatggtacacctgtataaggcacttaccgtgaatggagcttgcaggactaaaagtttctctgggtgagtcagtgagtgaattgagggcctaggacatgactattcaccactgtagtctacatggtacaattagaccacactaaacttataaaactttttatctttctttggtaataaattaaccttagcttactgtaacttttttacttcagaacttttaatttttaaaaaatattttgactcttttgtattaacacttagcttaaaacaaacacatagtacagctgtacaaaaatatttttatatccttactctacaagcttttttgtatttttaaaaattatttttctttaactttgtaaacttttttgttaaaaacaaggacaaaaacacacacgttagcctaggcctacgcagggccaggatcatcagtataacagtctgccacctccacatcttgtcccactggaaggtcttcggggcagtaacatgcatggagctgtcatctcctctggtaaccatgccttcttctggaatacctcctgaaggacctgcctgaggctgttttacagttaacttttaaaaacatgtagaaggagtaccctcaaaaataatgatagaaagtgtagtacactaaatacatacaccagtaacatagtcatttattatcattatcaagtattatgtacagagcacaattatatgtgttatactcttataccagcagcacagtatgtttgttattccagcatcaccacagacacatgagtaatacgttgcactatgacattatgttggctatgatgtcacttggtaataggaatttttcagctccattataatcttataggatcaccatggtatatgtggtcccacattgactgaagtattgttatatagcacattactgtataccttgattctttttatcctcacaacagtcccaggagggtgatactattattattcccattttacagatgatacagagtcacaggaagactttaagtggtggagtcaggattccaacccaggcagcttggtttcagagtctgctcttaactgctacaatttatattttataagaaatatatatattttaatttaaaatgtcctccccttctcacgtatcctactcgaacctgcatttcaagacccaggtcaaatcctactccttattttattttattttattcatttgtttttagagatagggttctgctctgtcaacttggctggagtacagtggcatgatcatatagctgactgcagcctcaaactcctaagggatacttttgcctcagtgtcctgagtagctggggctacaggtgcatgctgctgtgcccagctgtttttttttgtttgtttttttttttttcatagagatggggtctcacttttttgccccatctgcctacttcttattttaaagcccatcctttttttttttttttttttttttttgagacagtgtcttgctctgttgcacatgctggagtgcagtggcatgatctcggctcactgcaacctccaaatcccgggttcaagctattctcttgcttcagcctccccagtagctgggactacaggcacatgccaccacgcccgactaactttttgtatttttagtggagatggggtttcaccgtgttagccaggatggtctcgatctcttgaccttgtaatctggccacctcggcctcccaaagtgctgggattacaggcatgagccaccgcgcccagccttaaagcccatcttaattcagcctgcagactctcacttttcttgattctaatggcaagtcttgtctgttaatctaatttgcagctagctttgatacagttctgcaggtgctgtcttaaaggtattatttatttaaattatattgcttaacttgtcattatggcctaacattttgcattctgggttaccacttacaggcttaggataactcctcaaacctagtttgtatcttttgtaaagtggcaatatttgctctggggtctgcaaagtaaatagtatatctgtaaagctgctaaacaaatattatttgtcactactccctttagggacaaggctttttatttttttatttattaaattttataattttttattacactttaaattctgggatacatgtacaaacctgaaggtttgttacataggtgtatacgtgccatggtggtttgctgcactcatcaatccatcatctacattcggtatttctcctaatgctatcctttccctagccccccatccctgacaggccccgatgtgtgatgtccccctccctgtgtccgtgtgttctcattgttcaactcccacttataagtgagaacatgcggtgtttggttttctgttcctgtgttagtttgctgagaatgatggcttccaacttcattcatgtccctgcaaaggacatgaactcatccttttttatggctgcatagtactccatggtgtgtatgtgccacattttcttcatccagtctatcattgatgggtgtttgggtgggttccaagtctttgctgttgtgaatagtgctgcagtaaacctatgtgtgcatgtgtctttatagtagaatgatttataatcctttgggtatatagccagtaatgggatggctgggtcaaatggtatttctgcttctaaatccttgaggaattgccacactgtcctccacagtggttgaactaattcacactcccaccaacagtgtaaaagcattcctatttctccacatcctctccaacatctgttgtttcctgtctttttaatgatcgccattctaactggcatgagatggtatctcattgtggttttgatttgcatttctctaatgaccagtgatgatgacctttttgttcttggccacataaatgtcttcttttgagaagtgtctgtgcatatcgtttgcccgcttttttgatggggttgtttgatttttttcttgtaaatttgtttaagttccttgtagattctggatattagccctttgtcagatggatagggacgaggcttttttaatttttaatgtaacttgaggaggaactaactagagaatactagaattaaagagggacactctgaaatgtgagtgaaatcaaacttaaatgaagggactgttaggctaaaaccatatagctcattctacaacatgtgtaagtcagccaatgacaaggcagtaattccttacttttgggaaaaaatttgggaaaataatagcaagaagcaatgagaaagaacacatttctttagaactgtaaagtaagggaaaatgcctcagggcatttttattaatagtacgttattaatgtcagtatttaagacaaaattgcttgtgatcagtcattttatgatatcctattattttgcactaatgctattattttataataatttaaaaatcaagaacactttgcattcatgtttcatttgtgaggcacttgtctgtctgtggtctctgtgtccagcagtgggagctgtgtgctgcacacactgggaagagctcaccaggcactgctcccccacacacaaatactcctccttgactttccctggaaacgacctgtttcaactcttttaactgatctctttcattatttatcttcatttctccaaataacatgcttatgttgctatttcttgatagcaaccccctccctttcctcctctccccccaccgcctcatttctctctgctcctccctctccctccttctccccgcagcctgccattttcctagctttttccaatagagtctatgataatttttggtagaacagtattcatcatttgtattatggtctataaaaaaatccacaattttttgtacactccttatattatcttgtttttttgtgtttatttctctgcttcattactttaatcctaaattctttgcaggctgtgtagatctccttggaattttcaaatatactaagtactttatcaattttatctttgcgaataaatctctgagggctttctggctggcttcccaaccttattcacagaaggctcacatagacactgataatatttgtatagcacagagtgtggtaaatagccgagaccgcttgtggccagaggcatcacagaggctccagtagccccaacccctaccaagcagttctaggtttgaatggattaatacctagatatatttataactcactcaagatagacttcagtgtctttcagcacatttcttaggaagctgtggtccaagggatctccatcatctagggtatttcctacaactttgtcttatgatggatcttctttttgccaaatctccagtcgttctcttatttcctcatttttgtggaagcatttgcacttgtcccttggtatcttttgggggattgcttccaggacctcccttagataccagaattcaaagatgctcggtagcgttagcatacaacctacgggcatcctcctgtatattttaaaccctctttagattatttgtaacacctaatacaatgtaagtgttgtgtaaatagtagttatactgtattgtctaaggaataaggacaagaagtgtctgcacatgtttagcacagatgcaaatttttttccaagtatttttgatccatagttggttgacctcacagatgtggagcgatgaatagagggagccaactgtcagtagttatttgctattgtagatattctctgctatctataatagctagcttgcaaatataatttgttcttttaatttaattatttaaaaatttaaaagcttgtcaattactattactgagaagttgtagaggaactggaactttcatacgttactgggcagagtgtaaaatgcttaccaaaggaatacatggagataccacatttatgaaaatgtctattctgcactcgtgcgtgattactagtttaactgggtgtagaattacaggttgggaaattttgtcaagattttgaaggtatgattccattgtttcttagtgtggatcaatctttatctgttcttctggacactcattgggcccctgtcagtctaaaaacacatgtgtgtcagcttgggaatttcttgttttatttctttgatttgtccttctctgtcttctccttttttcttagaacttctgttcttcatgaaccttccacaacaatcctctaattgtttttatctttcttgttttctatgtattttctattttctcagaaattttttctaaactggattttgcatcctgctattgaatttctattcatatgtttattaatttatagaagatcctttctttgaaaggatttatgttatttttttaatgtatccagtttttgtttcatgatgcaatgtcttatctctgaggatagtaatgatttaaagtttttttctacatgccctgtttcctcacattttttctttttcttttcttttcaattattgactttcgtattagaatttcttgtacactttctggtcatcctggttgctgctcacagttaagcgaggggctgttaaaaatttttttttaatctaattggaactttggtttctctggataggacttgttgatgggggccttccctctagagtgatgaggatgggctatgcaggtggcaaacgccaaatattattttaggtatttcattttgacatgtttatgtgactcagaaaagttcatttagactattacctggtgaggattagtctggcaaaccagtatcctgggagctgagcagaggaagaaggcataggttagcaatccccctgtttttggaatgatagtccccattctcatctcttcctaaaattcttcaatccaaagatattctgttttacttttccagaacataaatctttattcttctgccaaggtaaacgaaggtagtccttcggtagtgtggagtgtgggaagggatctgggtagccaacatatcttcaaacaactttcaagcagtcctgctgttttgagctctttatttccaggggagcctgggatagccactcactgagccctttggcatttctgtgatagaaacaagctgttttcctgtatttcccattggatgcttaagattttgttttctcaggtcttctacatcagttaccattatccatctgctttccagcttccagattttagtgatgttgctttatttctatattttgtctttgtccattcacacctttaaaaaaaatctgtttactctttggagtgatttcaggaggtaagggagaaggaaatagttgtttaatctattgtgtttacctagaagtcccaagttatcttttatagcacctcaatattttattgaaatcttgctcatttctcacaattaataataatttgtattagtataacttacatatttaatcttctatttaaaaataaaagcaactatatagaatacttatataaaaaacaaatctagtctaaaactattttattgaaatgctgcccctctccttgacttaagcttttgaaagtgcaaccccattaattacttctactctatgaaaaatttagatcattaggcagtggtatacaggttgagcatccctaatctgaaaatccaaaactcaaaatgttttaaaattcaaaactttttgagcaccaccatgatgctcaaaggaaatgctcactggagcatttcagacttgggatttttgttattttatttatttattttttgttgtttttagacaggatatcattctgccacccaggctggagtgcagttgcatgatctcagctcactgcagccttgactttccaggctcaatagaccctcccacctcagcctcctgagttgctgggactacaggcacaagccagcatgcctggctaattttatttttttattttttatttttttatttttttgtagagatggggtttcgccgtattgtccaggctggtcttgtactcctgggctcaagggatctgcctgtctcagcctcccaaagtgctgggtaaattacaggtgtgagccactgtccaggcagattttagatttttagattagagatgctcatctgagaagtatataatgcaatctgaaaaggtgcaaaatccaacacacttgtggtcccaagggatactcaacctgcattttcttgcataccaaattgaatgtttcaatgaatagcaacatcttatataatacattagggcctaaagttgaagaagtaaacaaatgaatcatgattattgttactctgctattataccttacacaaaactgagttgtattaaaggacaaaacataaacttagctgatgattgtgtggaatctattgtgtcttttaattctaaaggaaagcaaaacatattgctacttggaaatacagttttgtgtttgtgttcatttttaggtgacccacaacacaactctgaatggcaaagatacacttcatcactggagttgggcctcagatatgcccttggaatgtgccattcattttgtggaaattagatgctacattgacaatcttcatttttctggtctcgaagagtggagtgactggagccctgtgaagaacatttcttgtaagcttatatttaaagaatgtttgtttcagatgaattaaattagtctcacttaagagtaagatttagtttgagctttcacttctcataacctcattcagctgcatgaggattacctgggagcgtctaagcccaccatccctggagattttgatcaaaaagtctgagataggcttcaggaatctgtattttgaaagaactttctgagtggttggataaacatccaggtttgaaaatcactgtcataggaattgaagagcattaaaaattgtgtgtagatgatactgagatgaaatctatgtttaaaaaaaaaaaacaaaacagttcccaatttctggctcacagagcagacccctagaggctgcatagttattgccaggaacacggggatctgcaagcataccaaaaagcatccgtacattaagtaaaactcatatacagggagaatgttggcagtttcgaatagggggcctggaaaattgttgaccataaaatgaaatcctgaaaggctggtagtcattgtagagatagatcactctatggataaaaggattagaggaaggaaggggactagattaaagtaagttgttttttagggtgtggagtacttgggcatatatttaggccgatggaaagtaagacatatgccctaaatacattgaataaaaggaatggaattatttaattagtgatttttggggggtgtggattgttcacatgtatatataaacccactgaatttcaacccttagacttcttagacataaacctgtggcattaactttagacactgacctgtaatctgcttctgcttcctcaccattatcccttcataagtaaataaaaccacatacacttttaaaaaatttatcgtatatatcttgctcctacaaaacctgtggaacacaccttatctttggaccattatcattacaaagcacctaacagtttgtagtgtatatactgggctattttaaaagtcatcttatgaaaagaaagtcttaaaatgcagaaaagtttatgtaaaatacttctatataaaatgtttataattcctctttttctttctagggatacctgattctcagactaaggtttttcctcaagataaagtgatacttgtaggctcagacataacattttgttgtgtgagtcaagaaaaagtgttatcagcactgattggccatacaaactgccccttgatccatcttgatggggaaaatgttgcaatcaagattcgtaatatttctgtttctgcaagtagtggaacaaatgtagtttttacaaccgaagataacatatttggaaccgttatttttgctggatgtaagtatatgattttaaagagagaattcctattaacctgttttggtcttccttgaaagccttaattcttctggagtgggggggtgggaggagtgattctgtttctttctcatttctttgttctttaatataaaggctatacaaaggcactagaatatttgcttgttttaaaatgaattgcaagcttgttttccacataacctgtatctgtgtaatttgttggttttgtaatcagatttgaaacatctagcttctaatgtttagtttaaattcttagttaacagctttgttaaggataggatataatatttcttaaccctgcattgtttagaaattatgtgaattcattttccagttaaagtataccttttttaaagtatctaaattaaagaaattatagcaattttacacaaaatctttcagtagcataacatatcttctccatcttttaactattatatttgaggagaacaggctggcaggaggacatgggtgaggggaaacatactctcccactgcgttctatatatgttgtatgctctgtcattcaaggtgtctattaacatgatcaccccacagtctaaaattccatggtatttccaaaagtagtttgttgtgggctgccctgcccatgtggcttgtgttgaatgtccacagataaatatgtagaatttttaggtctcaattttagtttttctgcctcccttccttgtagcaactgtaatgttttggtgtcactgacagcttcatctttatcagtgagtcccttcctccctttatgctgaattagaagtctgggattttggtctaaaggtcgcctgaataatgtgtataagatagattgactagattttatgatatttcttttgattccttagtgctttttctttctttctttttatgattctcagctgtggtctagatcagcagctctctcgtttactcatacagtacttcgtgatgaatttcattcagatactgatgtattcccaaaggaatagccgggtttaggtgctcgtctcagcttgatggctgtaatctgactctctttttgtctgctcagtaatgcatttggaattcaagtgaaagtgaggttatgttcaaatttaaatcctggaaatcatattatccttcttaatggaatgttaggaaattacttgcaacatttctcacaaatagtcctggagtctaagttgagacccagtggtatatgtagtgaagttgcttcgtgagcagtaccaaaagtgagctattacttaaaagtatgaaagaagaaattaaaacttaaaaaatgagactgtgcactgtttccatttgtgttatttcagacagtgttgtaatcttttatcatagtaatagaacaagctaatttatagtttaaccttcatttataacgtttggaggttgaaatattgtacaatatttgttgagcagcagtaacatctcccttcagagagaacttttaggaaatttataagagcaggttatttcgtgagttaggtatcaggattcatttatttcctttctttatggatatcctgttaagccaccatttacggaaaagactgaaaagaaatttaggccgggtgtggtggcttacgcctgtaatcccagcgctttgggaggctgaggcgggcggatcacgaggtcaggagatcgagaccatcctggctaacacggtgaaaccctgtctctattaaaaaaaaaaatacaaaaaaattagctgggcatggtggcaggcgcctgtggtctcagctactcgggaagctgaggcaggagagtggcatgaacccaggaggcggagcttgcagtgagctgagatcgcaccactgcactccagcctgggtgacagagcgagactccgtctcaaaaaaaaaaaagaaaaagaaatttataatcggcttgttagtttttccctacacacacgtctgcgtgcacacacacctacccaatcaaaacctgctggcgttttgattgggattacattaaatccgtggatcaatttaggagaattttcattcttacaatatttgtatctcccaaactatgaacatggtatatccctacatttacttgagtcttctttaattcatcttaatatgaggtctttatgtcttttggtaaattttttcctagtgctaggtgttttctgatattattaaaaatgactttgttttttaaattgcattttctattgactggtatataaaaatgtagttgatgtatacctagcttttaacctagtagcttcagttgattattttataagttaatttctttgaaaagaaaattagtacatttcaaatactgtcctctcaaatttttccccttctgtctgtccttctatttatctcttatttgctcttgttatttagattttaatatttcaacttaatatctaccaaatcctaaaataaccagcattttaaatatattccatatttttggtatgtggttttaatagagtgactgaatatttggccttagatttaaaacaattttcagaataaatatgtcaatgtttgtttacttatctaattgttaaactctcatataaacactcattaatcctcttaatgttacctgaaatatcattgaaggatgttatccttatctctggggaaggtatgaaattttccaagttttggttgataaactaaggagtattttttttttaattcagatttgtgaaaaaaaaattttacagaatttttaaacaagtagtttttttaaaaaagaacttttacctaaagtgaaagatagtttggataaatatgagagaggaaataccagtttctatatgtgtatggttaaacatgattacagaaatatgaatttctacaataagcagtgtcagactgcagacttttaatttatcacttttttttttttttttttttgagacggagtatcgctctgtcgcccagaccagattccagtggcacaatctgggttcagtgcagcctccacctcccaggttcaagcggttctcctgcctcagcctcccgaatagctgagacttcaggcaccctccaccacacccggctaatttttgtatttttagtggagacggggtttcaccatgttggccaggctggtctcaaactcctgacttcaggtgatttgcccaccttggcctcccagagtgctgggattacagatgtgagccactgcacctgggctcatttatcactttgaaggtctcgtcttaaaaaaaaaaaaaaaatttcttttaatttttctagtcctgccttaaagctggggagagcagttttgataaagagaaaaacaacaaaagagccgcagtcagtttgtatatactgagatgcagaattttaccaagagttttctaaacaacagtacttataatgtattttagaactctgaaacatgtaacatgacttactgattttcaatatgatttggtatttcttttcgaatcacagtatattgatgatagatgataatacttttaacctgtagatttctctgacaacatattagactcaggtttctttgagagatttggtagcctctgaaataggattaagggaaaaaaagtgacaactgatatttcaagttgctacagggagtttccagatgagctaagagtcatttttcagtatattttaatctgtcaattctaatgtaatatgaactctgacaagacatgctacagagagaataattcctgcattattcaaaagtaaaatgtaaatagtaaattatttcattttttaggaaattgtggaaaacattgacgtttataaaatattatgttttcagggaaaatatatgtaatcataagtacctgcattttttttctgttagatccaccagatactcctcaacaactgaattgtgagacacatgatttaaaagaaattatatgtagttggaatccaggaagggtgacagcgttggtgggcccacgtgctacaagctacactttagttgaaaggtaatgataactgggaaaagatgtcagatggcaaggagtacgttggaagtgcatgttaaatgacatagggaactgcactagatcatttatgttacaaacaagatataaaaccaaatatgctgtataaaattacacttataagcactgcagttcagccacatgtacactcaattttatgtctcctcttttaagaagcttagaatgaagaacacttgaacatgaacagagactgtttctcggtagtaaacttatggctgattaatttcttctattttctgtatcacatacattttcttctctgagtatgtaatatgcttctaattagaaatttaaactttttatacaaattaagtattacgaatttgcccgttttttcctgcaatatttatctcttgccattttgaaattatttttctgttaattaacagtttttcaggaaaatatgttagacttaaaagagctgaagcacctacaaacgaaagctatcaattattatttcaaatgcttccaaatcaagaaatatataattttactttgaatgctcacaatccgctgggtcgatcacaatcaacaattttagttaatataactgaaaaaggtaagctgtacataaactaatgtcttaaaaataactttaaaagtggtgaaatgctttaatgaaaaatgcttatagggattactttttgctgattattttctttatagttacttaatattaatttcataaattttatttataaaaactttaaatgtataatttcaagttttactattttattgaatttaaatacttgaattagtaatttactctttctgataatttttgatttctgaaatatcttctgcccaatttttaaaaacttttattttgaagtaattgttgactcactggtagttacaataataagagccttgtgaacccatcccctggctattcccagtggtgtcatcttatataattctagtacaatatcagaaccagggaattgacactcttaaaacactgttaactagactactgaccttgctcagtttttatgtgcattcatttgtactcgtgtgtgtgtgtgtgtgtgtgtgtgtgtgtgtgtgtgtgtgtgtagttctatgcaatttataggtatagattcaggtaaccaccaccacatgcaagatacagaactgccctgtcactacaaaggaacttgctcatgttgcccttccagcatcccctgtacatacagtcacatccctgtgccttgacaacaacgaatctattcttcatctctgttttatcagtttgagattgttacataagtaaaatcatacagtatgcagtttggcattttttttttaaggatgtcctggagagccatccatgttgttgtatgtattaatagttcgtcccttttattactgattgcatttttaccaatcgtattaatatatagctccaaataaaaataaaatgtgcttggtctttttggtattcattcccatggtccatgtgcattaacactccatgtcaggctcacagcacactgagcaacggcctagaccttctcttagagactcaggcaggggagaaagggcctaaaccgaaggcatgtctcatacagtctcacagctgattagtagatgatcctgttgccttatttgtaagcataagtcacttttatcagttgttctttcctgtcgtctttgcgatttctggatttttcctagtgtcaccatggctacattttatccttgcatggtagtatttgtatgtatttgtctgccctctgccatttcagccttatttcccatgtgattctttcccgccactcaactgggcatacacactatcaccagtgtaatatgcagtttgcctcgctgtaccttcattattggcatctctgcctaaaatgcttttctgcattttttttggctaatttttgtctgattcttcctgcatagctcatcttaagttccatcttcactgtaagacttaccttaccatgcttacatttacatagtggttaatatctgtatcattcatttagaacttggcatttatattcttattaattacctttctttcttttttcttttctttttttttttttttttttggtcattccctaagtaaattagaagttccttaaaggtagatactgtgatcttaactacctttgagtattcctgacactaatttaagagctttgagcatgatcgattgtttaaaaatgttggcaagatgtcagtagtagaaattaggtttgtcaattccacaaatactgggtaggatgttgttggtcagcactaatgatgcctcgttgttttttatgttttcttctcatttgtcatattagaagatagtttttccctttaaataagtgtttaatctttaaaaattatatttgcagtttatccccatactcctacttcattcaaagtgaaggatattaattcaacagctgttaaactttcttggcatttaccaggcaactttgcaaagattaattttttatgtgaaattgaaattaagaaatctaattcagtacaagagcaggtaagattctcttaaagacttcctttgtgattattttggataaaatagttctcaaaaagaattaagcaaattgatatgcttaagctctcagattatttattatagagatttactaagaaccaagaaagacattactatccatgtaataacagcattgtatcatttgaaaaacaattgtaaatatgacttttactcctcagaatgttcccagatgcactatagtacctggcacatagctggtgctccgtaaatttgtgaatgaatgagtagtttttgctgtaacttttagcatcattaatggatgaattggcactagacagcagaagtgattttttaaaactgtgaagtgtggcagtgggaacaagctgtaattggtacttaaaagtcacaacatgactttttaatacattttaaatatttaggttgacttttatattatactatcttgtaatttgtggtaagtctgaaataaatgaggtgtacttaactattcatttggaaatttactgatgtctagaaaatcagtcacaactgtaaaatataacctgaaaaccttctttgtaatgttttggggagctcagaggcttttgtgaaacaggcagatattcaaatttgtttagaaatgtttcattttaactatatttacttagtttaaggaagtatttgttgaatatttgctacatgtttagcatcatactagaagttctaagtgtcatattaacaaagatgcacaaaaggtaatgcctgcctccaagaaacttccaaatatcatccaaataatacatttattcctcacagtcatctcaaattataaatcacattaaggtttattgcatcaccattagccctttgattatcaaaattatataatcctttagataatttaattgaccattattacttagagccagtatttggattaaaaagataacccaattttttattactattacagggcataatttcattggcttggcaggtatataagaattaaaatattacagtggataaactgctttgggtgttacatatacaaactcattgacattccgttggtttgtgttacaaatgtgaaggctttcttaccaaaaaaaagtgtatgtatgtgtatgtatatatatatgtattcatacacataatatatacatatatatatatttatttgttttccaatagcggaatgtcacaatcaaaggagtagaaaattcaagttatcttgttgctctggacaagttaaatccatacactctatatacttttcggattcgttgttctactgaaactttctggaaatggagcaaatggagcaataaaaaacaacatttaacaacagaagccagtaagttaactaagtgatgtatggctaataattactgtgtattctgaagttttacaacttctttaaaaagaagatgttggccgggtgcagtgggtcacacctgtaatcccagcactttgggaggccgaggtgggcagattacctgaggttgggagtttgagaccagcctgaccaatatggagaaaccccatctctactaaaaatacaaaattagctgggcatggtggtgcatgcctgtaaccccagctatttgggaggctgaggcaggagtgaatcgtttgaatctgggaggcggaggttgcagtgagccaagattgcgccattgcactccagcctgggcaacaagagtgaaactccgtctctaaataagaaaaaaaaaatgctattagagtccttaaaggtgggggaatgtttagataaattatgtaatacctgctaataaaatatcacagatattttaaatgatagttttgaagttttgtcatagtatagaaaaatgattggcataaattatgagaaagccagggctcctctatctatactatgattgccaccatattacgataatgcatagaatgatttttctcccattcttttctgcttggaattttaattatgcttttaactcattggccttttttttaaaaaaaaaaaacaattactaaaaaagagaatttgttagtttttatttgtgacctagacctgagaaatgtggctaaaaggtcttgaacttcagtttctgtagtatacccaggtcaagttaggtataaaatcaggtaactggttttctaaatatgataatttccaaagacagaatgatattctatcttcgaataaccagatgtcaggtgtaaaaaaaaaaaaactcagaaataggtttaattttttatttttttgagacagagtctcactttgtcacctaggctggagtgcaatggcgcgatctcggctcactgcaatgtccgcctcccgggttcaagtgattctcctgcctcagcctcccaagtaggggccccaccaccacgcccggctaatttttgtatttttagtagagatggggtttcaccgtgttggtcaggctggtctcgaactcctgaccttgtgatgtgcctgccttggcctcccaaagtactgggattacaggcgtgagccactgtgcccggccgaaataggtttaatttttaggaatcatttaacaaaagatagcaaaagctttatttatattatgcagtataatacttcctccaaaaatttaagaaatagcaaagcaaataaatgatagatgttaatctagatttttgcctctccacatgaagacatgtgaagaatagagatgagggcattttgcgacatgtgtaagaattacttgtatcatcaaaagtgaaagctatgcatgagtacagagagggaggatatgagttatctattgctgtgcaacaaattaccctaaaattcagtggcttaacacagcagatgtttatgatcttcccatttctatgggttaaaaatccaggagcagcttagctggatctctctgacttggagtctttcatgaggctgcagtcaggaatgtgggtggggactgcaggcttcactggggctagaggatccactttcaagatggttcactcatgtggctaaaggcaggaggcctcagttcctcaccttgtgggcctctctctaggcctgcttaagtgtgctcatgacatggcagccagttcctcccagagccggtgactgaacagtatcttttatgctctaaaatcggaagtaacataccattatgtctactgcacactgttggtcacacaggccaaccctgatgcaatgtgggagggcaccacgcacatggggattattggtcattttggagactagccactgtagtttttgccttcagttaatgagctgttgtctccaagaggaaacatcttatttgcacctcattaagatgaaggcatcaatttactcaacaaatatttactgagtatgcattacagattgaacatacgtaatctgaaaacctgaaatgctccaagatccaaaactttttgagcaccaccaggatgccacaaatggaaaattccacacttaagtacttaacacaaatttgtttcatgcacagaattatttaaaatattgtatgaaattaccttcaggctgtgtgtataaggtgtatgtgaaacataaatgaattttatgtgttcttggatcccatcctccaagatatttcattatgtatatgcagatattctacaattagaaaaaatccaaaatctgaaacacttttgctcccaagcatttcggatgagggatactcaacctgtatgtgtctggaattgttctagttagcagtgatatagcagcagataaaacagagatctcggcctatggagtttgtaggatccaggactagaaataaatttatatatatacacatctatatgtatgtatgtacacacacaaacacaaagacacagacacatcagtttatcagctggtgacaaatgccacagaggagaggaagtgataggaatagaggctgagggataaggagggggtgaagggaatggcagttttaaatagggtagttagaaaagacctcactaataaggtaatactcaagctgagatacaaagatcaggaagcatgccatattgtttttatctaggagaagagagttgtaggcagaggaagagagggcacagaagatgcagagagcctgaggcagttgtgtctttggcatatctgagggacagccaggaagccagtgtgtggccaagaaaggagggagtgagaggatgtgaggcagaggggaacccagggaatcagtacagctggcctgcaggtagattttcacccattcgagggggccgtgtgttttgcaaaagttgttgagagcttagattttccattgcttcattttctaagtggaagccactgaactgcttcacgttttattgagaattccaaacatcctagaaaaaaaatgccaagcaccatatacatatagtatgtgtcttcagatattaactttaaaatctcctttttaggtccttcaaaggggcctgatacttggagagagtggagttctgatggaaaaaatttaataatctattggaaggtaaatatctaatttttctgtgaacatttacattactttgctaaactgcttaacttacgcatggtacttgggttatcaaggagctgaaacttcccagactggcttttgttgcaatattggtgagaatctaacctggttcctaaaccccccaaattcctcgtcactcctaactccccacagtcatttgaggatctcctgtgtcagatctgagccttctcgagtttgatcttataaggcctgtaaaggacctgaagatttcatgaattccatctccctcacttcagtcaaaatctgtaggttagaatcctaagtgtttgttatatttttttctattaataggaaagtaaatttttatatacttcatgtgtaatttatttcccttcaataaattgcattataacatgccagttataaagttttgtatgattttgtaaagtatttagatgaaatatgaattgcatattttactaatttttctctgctggaacattttttgttgccatatttttaagtattttatgaatatcaaaaacatgaacaattgttttctatattagattttacacaagcagtcataataggattcctttaaatagtgaattttgttatggaaagtaaaacataattttatttaaaaaaacttttgacgtcgatacagctttgagtaaagtgaagtgtacatgcaggttcaatgtgagttccattgctttgagattgtatttgactgttacatccactcttgattagaaaatcccccagctactctcagttgcctgtcagatttcatgataatatagcaacgattatacaatttacttcaatatacgaaagtttgaaatattgttcaaactagacgaaaacttaagactaaaaacattgaaatgatttagattctagcttcattatctatgctgatggtgccgccatttgccaagtcagagtgtgttcgggtagaaattatgtagttttggtcatagtgagttttcaaaaggtatgccactgggatatcatgagtagagttcagtaggcggtttgatatatgtaaggctctggagctcaggggagaggttggcactgaaaacagctttgagtagcatataaatgggatcacttggagatgcaaggtgaaaagtgggccagggatggagcccaggtgacagcagcatgcatagaaccagcagaggaggaggaaccagcagaggagatggggaaggtttagaggggcaggaacaacgaagaaaatagaattagagaagctgggggaggaggacatttcaaacagtgtgtggtctggagtatcccaagaagcccataagtcttaggactaaagcctgccccttagagcaggccatttggagcatcacagagacctctgctggagcagagtgtttcgcagtgttagatcatcctcagtcttgaccagagagccccatacattggtgtataaattaaggcagttgttatgaaaagcagttcagtataaatgaagaggtttgaatgttcatttgtttttatacagtaagttcacttttagaaattcatattaaaaatttctatgaaaaagaaaaaaagtggcacaaaaaagttcaccaaaatatttgttttagtattgtgaaaaattagaaacaacttaaatttcatttatttaagggatattcaagtacactggtaaaaatgctacataagacataaaaccatgaaaatgtatataactgtattatggacaagcgtatattagcatatattatggaaaagtaaaaagtaaaatggtgtaatatgattaaaacaatgttagtaaaaaaatctatacctagaaaaacaacttgaaagaaatatcaaaatgaaagaatacttaagaggtgggaatatgggagatttttacttgtttcaacttctatatattttccaaattttctgtagtgggcatgtaatactttaaaatgagaaaacaaatgtttagaaaaaaacccatgatgctattttttaaaatgttttgtttgttgctaagtagagcagtgcttctggatagttttaaaagttttgctcctgaaaaatgtggagataaatattgttttttattcacttaatttttaaatttttgtgtactcttactgcttatagcaagtatagtttttcttcagtgtctctttcctgatttaccctgctcccagtggattttaaatctgtgttttacactgttgagagattcatttttgctgttgttgttgttgagacagagtctcgctctttgaaccagtctggagtgcagtggcacaaactcagctcactgtgacctccacctgccaggttcaagtgattctcccgcctcagcctcctgaggtgccaccatgcctggctaatttttgtatttttagtagagacagggtttcatgtttgtcatgtttggcaggctggtctcgaactgctgacctcatgatccgcctgcctcggcctcccaaagtgctgggattataggcgcacttggccagcttcatcttttctgatactaccttgtaactggttgttttttgtttttgagatggagtctcgctctgttgctcagactggagtacagtggcatgatcttggctcactgcaaccttcacctcctggcttcaagtgattgtcctgcctcagcctcccaagtagctgggattacaggcgctcaccaccacacctggttaattttagtatttttgggagagactgggtttcaccatgttggccaggctggtctcgaactcctgacttcaagtgatccacctgcctcggcctaagtgctggaattataagcgtgagtcaccacgcctggccaaccttgttattgttaatatagtgtccagtttaaacccaattaccttgcctagtcacagtcacgttttgcagggttttataacaatttgtctgtttttcatagcctttacccattaatgaagctaatggaaaaatactttcctacaatgtatcgtgttcatcagatgaggaaacacagtccctttctgaaatccctgatcctcagcacaaagcagagatacgacttgataagaatgactacatcatcagcgtagtggctaaaaattctgtgggctcatcaccaccttccaaaatagcgagtatggaaattccaaatggtgagtgcttgagatgatttagtatataagaacgggaaactaaagtgagaaatgtctgatgttacttgctcttttgtcatgtcagccttcttctcgtataccttgttgctgctgacctagaaggcagaatgagcagattgatgtctacagttcattgagaaagaagtcattagtattgacttgaagcatgtgcactgatggatacaatcattactgtactcagtaactatagtggataatattggagagttacagtggtggatagtacttttaggaagaaatattttaagagtttattcaaatgatattcagacgcttctccaagacacttccccaagactaggaaagtttattttaggtcagctaggctgttttgcaaattgttgggcaggaaaaaaaaaaaacgcttattttaattagcaccttttttgataagaaattccttattaatagaaattctttattgattaaaaaaagtcttcttaaggtataaattagatcttcaatataggccttagaaaaacaactgtggtgtagtttttaaaatttagtgcctttctttaaattttacagatgtccagtgattaatacattcttcccagcttctgccttgacaactttgagagttatgagctttaaacggccacttccacctcttcttccacagacctctgtgctccagtcattttctgcctacccacctttgctctcttgccccgatatgggagcacctttctgtaaccacagctcctagaggaagaaaaattggtccagttagggtcctctaagtagctttccaactccagtttgaggctgtttcttattgttacttgactgcatctttgttctctttgagtcagtcataggagaattaggaggaaggaagggggaaaacaaagtgcatttcagagatacaaaccccaggcagcagtgctgctggagatgcacaggggttgtggcaggtgctgggaggaggggcttaataatggcttcttcattttggcctggcaaaaataacaaaataaaaaatgaaggagacagagatgtgaacatccataagaagataacatactgatttagattatatgtttcattgcactcacaatgctaggcaatagctatgttgtcttttaattcaggaaacataatcctaccttttctgtgtatcccttagaaaatggtaatttacagaactagcaattctgtcatcagcttccagacactttctgaaaccccagaacaaatcctcattccttgaggatttcccgagtggagggaggctctgcagcctcaactcaggtttacactgtggctttttaatcacgttgagcaaaaaaagctgttatgtccgaagtgttctctattctcagccaaattgttgtcttgcgtttagtagtagttgctttatgaatgtacattttgttcaaaaaacttgtctgtgtttatttttactgaacccttaaatataaatcagttatagctattagttactttctcctgttacagtgggtaatgtctgtgttggttttactgaacgctctctgtagcctgtgggtgattaagtactctcccatggctgcatcccgtcaagggccgctcacctgcagtttgcaggctcctgagcatctggctcctgcgacaattactcgtctaaaaatttattcttagaaacctttctatgtttgtttttactgaacccttaaatacaaatcagttataaaatctacctcttttctcctgttacggtgggaaattttcttctcccttttgaccacactgccctatcttctaccccaattcttcacccccagcctggggttccacttcttacctaggccaagatctggcaagacagggaaacaaaaccttgccagggcctctgcgcctgtcttctgccctcagcctttgccccttgccccttgccccttgccccttggtgtctcctaggacgctgtgcagacttctccttctcagtgtccacactggccatcccacctcatcgcctctgggtgtctccacagctttctcccttgcccccaccctacccctggtcagccagacaaccccttcagcccagctcttgggctgcagtcttcgttgaaagaaagagggggctagttcttctgctgtttccacaagtttgttgtgtgcctactctgcacattgtactgggccccgcttgttctctgcacgcattcatagtgagtgatgagaggagggcttcagactgtccactgtcccctccccagtctccctctcccaccctgtcccagccagtgtccttagctgcgtccttcctgtgccttgatcttgatgtcctagtcccagtatgtcactacctgatcctaggcgctttttaaaaacgactttctttgagctgctgtgttaatctatgtatacaggtaagtgctacagttgttaaaatgaaaataacagagcaacacttctaatctttgctctaggtttatctagtttgagcactattttataatttcttcacaatgaagtgatttttctaactcatgtccatttttatgagatttgccttatattattgtttttaatgccagtaaaatatcctcctttcttattgaagatgatctcaaaatagaacaagttgttgggatgggaaaggggattctcctcacctggcattacgaccccaacatgacttgcgactacgtcattaagtggtgtaactcgtctcggtcggaaccatgccttatggactggagaaaagttccctcaaacagcactgaaactgtaatagaatctggtaagatgaattagtgtctctcaattaagttctacaaaatatttttaaaaggcaacacgtaagactgggtgcagtgaagtgattctctttactgctggatgggtataaataggtttgactttcctgggagggtagttgtggcagcacatggaaggatccaaaccctttgatctggtaattactggtctagaaatttattcttagaaataatcagagaacaacacagatttaatctaagaatgttcatgacagtattattgataattgtgaaaaattaaaaacccaaatagcaaataagggaatgagtaaatgatggtacacctataaaatggaatgttaagtaacattaaaaattatgtggaaaattaaataaatgttcatgaaaaaaaaaaactacggaactgtagcctggtctcacacaagggcctttgccttgtttgcccagggtccaggttaccaaggttagggagagactgagcacaaagaccgtgaaccccttaccacttaaccctgatgcagggcaagggggcatcggctggactgagcgcagtgtgggtgggaggccttgcgttccatgagcctgatgctcaggagcttgtgagctgccggtgagtgtccctctatgggatgcagcctgagaagtttttccacagaggagtgtttaataacctacaggctaatccagccttgtccttaggaattagagccctctctgcaatatcatcgttgttttcctggcacaatgggagtgtatcctgcctgtccccatgggatttctggaccctgtagcttgtcagtagtgatgcttcgtgatcattcctgtctcctgcctccctcgcgtgttagggaagtgcagaagagcaagcagcctgctccttacctctctctcagggaacactttctacttgcttactgtttctctctcagatgatgaggatgggtcccattcattggattatcatgtatgagttcagattattttccagttctacttggaatacagccaaactcctccacatgtataattggctgaagtggtaatgatcttcctgagttgttccctttatccttccttacagtgcactgtacttatcaaggacccagccacatgctacccttcttttcctgcaccttcccttccatcccctcccatgttgctgaatgagccttacacgattccagtctgtcctttctcacctgagcttttagaataatcaggatggactgggataggctggagtggatataaatggagtatctacccatttaagttttagctgagacctgcaggatatggggaagctgccccgcgatgattgtgggaagagaactttctgtgccaactcaattgaacaaagacacaaagcttgagaaaacaaaaactcagagaagttaggtgccttttccaaggtcacaaaattagtatgtgatagaacccaggttcaaattcagagttattcagagcttcaagaggctgggaatattgtcttttatttactgctgagcttctggaacagcaagtggcacatagtaggcacaccttttattcctctctcatcctgttctctactcattaagctgtccactctcttttttgaccttagcacattcctaatgctctaaccttctcagcctctttttttaaagtgtcagagccctataaaatattgttaataaataattttaacataaaaagaggtacagatttacagatgtacatgcagtataaaatgataacctcaagcatacctttctccaaagaaaaatgttacaaaactaaacacagttggctgagcttgagttgcattactgcatacttaggacgtgccagcacataacaaacgtttaaggaaagtgattacaagaagaaaagttaatattttagacaagttgattcagtttttcttgggttgtatgatgttagaagttgactactgtctcaaattggagcctgtaggccactggtgttttataggcacttgattggagaactaatgctttaaccacaccagaataattgcattctgcaaattaaatgcaatgccatatgctgccaatcccccctgcgtgtcccccggcattatcttctttctcgaccaccactgatgagcatctaattgcccttcaaggccttattcagatggcccttattgtagctgtttctgatctttttagactcatttggcccctcacttaagattccatggcatctgatacatacctctaatataacacactgttatggttacccttgttcgtctgtcttccccaccactctgcaagtgtctccatgcttgacgttttgtgcatgtctgtgttgctcacattgtacacattgcattgtattcaggagacatttaaaagcagccttttgaatttaagttaaggtacttcaattggaagtacctctatgtcctgtggagttaattcaaagtatttctatatcttgtggagttaactcacccaaggacacttaatggtgatgttataaagaggaataaactctaagacctaattcctttaacactgaagcttcaaggcagagtgcaacttttaattctgcttcttggaacaagaggagagagcagtgggtttgtttgctttttccaactcagaaataacactaggtaaggaagggatttatagaggcatgatgtggacctcgaatgaatggcttagtgaactgacccaggaagttgatgtagacttacattttgttcattaaaatcaagcagttgccagcactttgggaggccaaggtgggtgggtcacgaggtcaggagtttgagaccaacctggccaagatggtgaaaccctttctctactaaaaatacaaaaattagccaggtgcggtggcgggcacctgtaatcccagctacttgggaggctgaggcaggagaatcacttgaacccgggaggcggaagttgcagtgagctaagatcatgaccctgcactccagcctgggcgacaaagcaagactccgtcaaagaaaaaaaaaaaaaaatcaagcaatgatgatttcttcctggaaaaaggaacaaaatgtaagccttaaatcatcgttgttctcttcaatgcaatcccatcttatattactaaactttttgttaaaatagaagtaaatttaatttttgtttagtcaattttcttttgaatatttactagtctttaaaatatatatgtattttttaataagaaaacatctttaaaattagctttggaaattttagagtatgttatgaacttgatgtttctaaaatagatattcatagtaatatatttatgaaagtttgctgatatgttcatcctatagatgagtttcgaccaggtataagatataattttttcctgtatggatgcagaaatcaaggatatcaattattacgctccatgattggatatatagaagaattgggtaagttaaatgggtacttatttataagagctcaaggcaacatgagaaattataaattggcaacaatggtatgattgaattctaaaaataagatgtataattgaaggaaggtaaaataatttgataaattaaaaagtatttgattactacttttttctcctcctcctctttttttttttttttttttttttttttgagagagggtcttactctgtcacccaggctggagtgcagtggtgagatcatggctctcttcagcctcaacctcctgggctcaggtgatcctcccacctcagcctcctgggtagctgggactacaggtgcatgccaccatgctcagctaatttttttttttttttgtagagatgaggtttcattatgttgcccaggctggtctcaaaattcctgggctcaaacgatcctcccacctcagcctcctaaagtgctgggattacaggcatcagccactgcactgggcctgcttactctgaaatcatttgttgaatgtttacatttcacaattttactcgtcctcaggaaaattaaatctgaacttggatgtcaaaaatatttaattagtacttttacaagtttaaaaaactattaacttcttcaggactatcaataaagatgtgaaatacaaatgaagtctatctgaatagccactgaaagattttgcatagattgcttccctagatatgtgtttgtctaaaagggatattgtaagttctacctttgttcctaaaaatatttttgtctatggttattagtatgtaagcttcacaaaaaaagcgtttgtgatcatctctctctgaaagtttatgattaaataaagttttaattccaagttgaattatttttgaggctagaaagctcaggaaacattactgtattactctgtattcatacactcccctttagcaattgactttttccttttacagctcccattgttgcaccaaattttactgttgaggatacttctgcagattcgatattagtaaaatgggaagacattcctgtggaagaacttagaggctttttaagaggatatttgttttactttggaaaaggagaaagagacacatctaagatgagggttttagaatcaggtgagtaaattgatagcacaaggaaagtgtttcttagaagtttctcattaaccacaacagaaaaaaaaggaaagtcctgctcagtagtttagtactggttttcaaaactatctgaaagatagagaaatgaaaaggcagtaattctatgaatataagagttttaagattttagtgtgcaataatgacatgtatagtctttcagaaatcatttaaatcatttattctgaagccgttgattataagcctcataggacagaaaccatctcttattagagctgtacataatccataacaaggcatctcatgaagtttacttccaaaaagaaatcttttacttacagcagtggaggagaaaaactcaggaatccaaagagttagcttcagatcctcagttgtaatttgacaaaaaaccattggcctattagcgtcttagccatgcccttgataagctggaaaacttaattgacttgattggggatgtattaaaaagtacagacaatccttggaaatcggcaagtgtacatccaaagactttagagaattctcagatttacaaatacaaaattgtacagatttctggcttttcctttcattatgtttctgctgagaatcagatatttcttattcatagctgcataacacaagcatatcatcttttcagtttgagagctttcatgtccctggatgacctcgcctcagaaagaaatcattttaattatttaatgcctgtctgagaaatagagaactccaccacggtatggcagtgctggccgagcactgtctcagtcactccctagaacacctgcagaaagtgtgtgcctccccttcggtccccaagttctgcatttcctgaaccttcatgattgctggtgaatgagggacatcctgaatatcaaattccacaaacatccagagcctagtgtgacttgcctcacatgcttggaaattttacacttgaaccagttaaaattctagcatctggatttccagtgagacatggtagatgggtcactaaagttagcataaagaaggggaaacacccccaaactctaataaagccacaaggagagaacagaagaggcaaaacaacactgaaaaagaagattcagaaatttgtgggtggaagtggggcaaatgacttaaatgagtggaagattgtgaaatctgtgtgggcagtcaggcattgttgagaaggaacttctccagtacctgccagaccaggccttggaggctgagtggtgaggatcaatctggtctgaacggaggggtcgattgaagaacgttccttagaactgaagggcctaactacaagcagatccccttctccgctgtttcacttaccatggtttcgctttctgccatttcagttacccctggcaaaaagcagtctgaaaatagatgagttcagtacaataagatactttaagaaagagagagaccatatttacgtaatttttattacagtatattgttataattattctctgaggaaaatgggcggactactgtatatagagccaaagaattcattaaatacacagcaaaataaatagaaaaaagatctatgccaaggtatgtcattatgaattttccaagcagctaatgtgaaagaaatgatcagagacaagcaggtcatgtgcaagcaatcaggaataataatggcaatagacagcccagcaacactccagatactagaagtctcttcaaaatactgaatgaaaattattttcaacctaaaattcgatactccaccagtctgtcaaccaacgtgagagagaaatgcagatattttgtacatgcgaggctgcaaacatttactttccccatgttgcttttctcaagaagctactagaagagtgcatcctaatgaggaaatgaagtgaggccggtccaggaagccacaggggagagagagcagggagctccaggagggcctcagccctgaaggcatccagtctagtgcaggaggcaagggatgggtggaggggagggcagagaagatgtggacctgggattttgttgtgtttgaccacgtggaaaatctgagtgtacattggaggatatgggaagaattattgactggtatgtagaaaatcaagcaaatgagggaaaaagcagttataacaatgggaaaacaagataggaaacatgatgacaccaagcaatgtgtcttagcagtaactcatatttatataatcatagtaatccaaacactgaattcatcaaaagttccgatgtttctatacgaatgatgtggtgggggaaagggtgatggtagcgtaaaagagctctatctttatctgcccttataaagtatgtgtagataaggtctaatagttaaaagtcacatctctctaagtttgctactttggaatatagagataaatacccaaagaaacttgattacatggcttttacagtggttgtagggggcgaggggaggagctggtagagaactgtcactttttgttagtaaccatttagtactatttaattttttaacctgttatcctgcattattctggttaaatttttaaaaataaaatagtagttcaaatgattcctcactcttccttttgaagttataacccaaaggatttctcattagtcttatttgagagtccccatcacactgatcctttttctaagtggtttggagtcatctctattgatctgcaggtttgcttcatcccatctttcactctcactcatgggaaggctcagcctaagtggcttttggttgtggtggttttcatgcttttagtagcagaaatgggactattattgattgcctgctgtgtgccaggcattatgctacagaatgtgtgtgaaaacttcaaacagcttaagtcatgatattctatttcatcagtagaaaaactccacttgagagtggtttaaataaggggcccatacgacacagctaatgactggcgtgggggtagagcttgaacaaggtagtggcagctccagagtccttggctgggatggcctcagctagacccacttagaagggcagttggtgagacaggtgtgggtaaccatgcatttgaaacgggttagagattagtgctaacatacttcattttaaaaataggtcgttctgacataaaagttaagaatattactgacatatcccagaagacactgagaattgctgatcttcaaggtaaaacaagttaccacctggtcttgcgagcctatacagatggtggagtgggcccggagaagagtatgtatgtggtgacaaaggaaaattgtaagtttcaggttgctgttgaggtgctttccatcctgcatgcgtagtgttctagtgattcttggtttatgtaggaacccctccccgccctttctaaaaaacattcacattttgttgcagtttttggctggtagagggaagggttaaaaagctgtaagattacttcatgtttattcttgtcagttatttgaagttatttccaaatgagtacctaagaaattaatgaatttgggatacatctgaagtctagaggtctaaagtcatattgaatttatctaacggtcaacatttaaaaatattttgctccagctgttatgtgatttctaacatatctagggaaaagtgaaggagatattcttaaaaaaattttttgtaaagcacaacactcaaatttgagagaagagtgatggccttgactatctttctgcggtaaagaacttcacttcgatcataggcttatcctctacccctgagttggagttcacacacagctcttatataaagagccatgaggatatggttctataaagcagtgattctcaacggagagtgattttgtcacctaagagatacttggcactgtctcgtgtcatttttggttgtcataactgggggatactgctggtatctagcggtgagaggccatggatgctgttaaacttccagtagtgcaaggactgtctcccctgatcctctagtgaagatctgtctggcctaaaatgtcacaagtatcaagattgagaaaccctacttggaagagtttaagtatttgtataaaaattatcacaatacctgaaagtttgattttaatagtttttcagtgtccctgcagcagttaattttgtttttttcctaaataatttaccaacctaaataccttctaacatacatctattctgtacttcacactaaaaatggcgattttaatatttgcaatactctcgtttcagctgtgggattaattattgccattctcatcccagtggcagtggctgtcattgttggagtggtgacaagtatcctttgctatcggaaacgagaatggtaatagttctgcatttactcttgctgttttcttcttaaaggcatgattataagatttgtaagattagtttatgtattaaataagtgtatcttttttgttgtaataagttagttaaaaaatgttttaattagaattaatgttggatttaatattaagaacatgacatattatttaaaggtcttaatagagtcaatgtgtaaattttttctactatttttcctaataatttaaagtcatagcagttactattataaaaaatatttataggctgaaatatggcaatagctatctacaagattaagcataatttaatgattaagatctcacttgccctggtgacctatttagaaaatctggtcattttaatcatttgctcatttattcaacaaatatgaatgacctcttccatgtgaagggggatatcatatcgtggtgcacaaaacaagccatggctcttatagacttggagcacagtgtgggaagagggacagtaaaccataggcatccagcaagtgtgtgcttgcagagtgtgagtgggtgctaggaagactgaaccaggtaccctgaggagaccagcagggggctacgtcctgcgagctggtcggccatggcccgtcacggctggtctgcggtacagttccaaagggtaaggagagggaaaagaatgttacagacagataattatttctttgagggccctgaaattggaaagagtcaaaccttcagagaaagtgggaggagctgtgtgcctggtgaaacaggaatgagtgacatgaggtgaggtcagcgggagctccgtgggagagagggccatgtgcatggtcacctggcaagagctgtcctggctgggtatggagccagtggctgcattcatgcttagaccagtcctcaccgaccttaaaaatgccatcatttatgacaagagaacatattttagcaatcctggcttataaatcaaaatagtaatagttgtagaactatagaatagtctattttggtaaccatattctcattaccaaaattcacatttttaaaacaactattaggccgggtgcagtggctcacgcctgtaatcccaacactctgggaggccaaggcaggcagatcacaaggtcaggagatcgagaccatcctggccaacatggtgaaaccctgtctctactaaaaatacaaaaaattagctgagcatagtggcacgtgcctgtaatcccagctacttaggaggctaggaggctgaggcaggagaatcacttgaaccagggagttggaggttgcagtgagtcaagattgcaccactgcaccccaccctagcaacagtgcaagactctgtctcaaaaaaaccaaaaaaacaaaaaaaacccaactattaaagtaccaaaaaaagaaaaaaaagacaaaataagaagggagtttagaagttacagcgtttcaaactcacattaacaaagttattttttctgtaggaatttcaagtaatacagttctttttagtagctataaatataaaaatatgataggacactgagcaaatctcatttttggttgcgtttagttttcggtcaagattaatagcctttttcttagcacagcctgcagtgtactcgtgacacgtggctatcacttttatgaccacctcggtaaaggcaaatctcatttttggctgcatttagtttttggtcaagattaatagcctttttcttagcacagcctgcagtgtactcatgacatgtagttatcacctttatgaccacctttttaaccacctcagtaaagcagtgccatgggatcacagctgttcttacatagtccagatcctttggactagatggcacagccacaattttaattacttgctttccattttcatgagatacatgggtattatagttccagaaatggaattctgtttatggttttcaagttggaacctctcagtgcattgtatagacagctgtagtgaatgatcacactaaagatcttccattttaatctcagatgtgcattaaaggattcataaatacttcaaaataagcctaatgatttattaatttattatctaataatcttaaaactattaaatttactgtaataattttttatttaaaggattaaagaaaccttctaccctgatattccaaatccagaaaactgtaaagcattacagtttcaaaagagtgtctgtgaggtaatcttttattttcttatatttatctttgatgtgctggcttctttttttaatcttttgtgaaaagtttttaacatgcaaatgtcattttaattaaaaagtattgggaaaattatatactttaaaacatctcagtttctaaaattattaattttaaattatacagtgctcttttttctcccacaagtattaataacaaggaaaatactgatacggaagaaaaaagtggctgtgctgttgtgtgaaatacagagtagtagagacacctgtttacaagcagattggggaaaaatgtgtccctttttataggaggagcattgcaatggcatttagtgctatttttaatcactgtgtttaaatttatttctagggaagcagtgctcttaaaacattggaaatgaatccttgtaccccaaataatgttgaggttctggaaactcgatcagcatttcctaaaatagaagatacagaaataatttccccagtagctgagcgtcctgaagatcgctctgatgcagagcctgaaaaccatgtggttgtgtcctattgtccacccatcattgaggaagaaataccaaacccagccgcagatgaagctggagggactgcacaggttatttacattgatgttcagtcgatgtatcagcctcaagcaaaaccagaagaagaacaagaaaatgaccctgtaggaggggcaggctataagccacagatgcacctccccattaattctactgtggaagatatagctgcagaagaggacttagataaaactgcgggttacagacctcaggccaatgtaaatacatggaatttagtgtctccagactctcctagatccatagacagcaacagtgagattgtctcatttggaagtccatgctccattaattcccgacaatttttgattcctcctaaagatgaagactctcctaaatctaatggaggagggtggtcctttacaaacttttttcagaacaaaccaaacgattaacagtgtcaccgtgtcacttcagtcagccatctcaataagctcttactgctagtgttgctacatcagcactgggcattcttggagggatcctgtgaagtattgttaggaggtgaacttcactacatgttaagttacactgaaagtgttcatgtgcttttaatgtagtctaaaagccaaagtatagtgactcagaatcctcaatccacaaaactcaagattgggagctctttgtgatcaagccaaagaattctcatgtactctaccttcaagaagcatttcaaggctaatacctacttgtacgtacatgtaaaacaaatcccgccgcaactgttttctgttctgttgtttgtggttttctcatatgtatacttggtggaattgtaagtggatttgcaggccagggagaaaatgtccaagtaacaggtgaagtttatttgcctgacgtttactcctttctagatgaaaaccaagcacagattttaaaacttctaagattattctcctctatccacagcattcacaaaaattaatataatttttaatgtagtgacagcgatttagtgttttgtttgataaagtatgcttatttctgtgcctactgtataatggttatcaaacagttgtctcaggggtacaaactttgaaaacaagtgtgacactgaccagcccaaatcataatcatgttttcttgctgtgataggttttgcaagccttttcattattttttagcttttatgcttgcttccattatttcagttggttgccctaatatttaaaatttacacttctaagactagagacccacattttttaaaaatcattttattttgtgatacagtgacagctttatatgagcaaattcaatattattcataagcatgtaattccagtgacttactatgtgagatgactactaagcaatatctagcagcgttagctgtccatatagttctgattggatttcgttcctcctgaggagaccatgccgttgagcttggctacccaggcagtggtgatctttgacaccttctggtggatgttcctcccactcatgagtcttttcatcatgccacattatctgatccagtcctcacatttttaaatataaaactaaagagagaatgcttcttacaggaacagttacccaagggctgtttcttagtaactgtcataaactgatctgaatccatgggcatacctgtgttgcaggtgcagcaattgcttggtgagctgtgcagaattgattgccttcagcacagcatcctctgcccacccttgtttctcataagcgatgtctggagtgattgtggttcttggaaaagcagaaggaaaaactaaaaagtgtatcttgtattttccctgccctcaggttgcctatgtattttaccttttcatatttaaggcaaaagtacttgaaaattttaagtgtccgaataagatatgtcttttttgtttgttttttttggttgtttgtttgttttttatcatctgagattctgtaatgtatttgcaaataatggatcaattaattttttttgaagctcatattgtatctttttaaaaaccatgttgtggaaaaaagccagagtgacaagtgacaaaatctatttaggttctctgtgtatgaatcctgattttaactgctaggattcagctaaatttctgagctttatgatctgtggaaatttggaatgaaatgcaattcattttgtacatacatagtatattaaaactatataatagttcatagaaatgttcagtaatgaaaaatatatccaatcagagccatccctaaaga

SEQ ID NO: 115 - DNA, 5245 bp, Homo sapiens
ctctctcccagaacgtgtctctgctgcaaggcaccgggccctttcgctctgcagaactgcacttgcaagaccattatcaactcctaatcccagctcagaaagggagcctctgcgactcattcatcgccctccaggactgactgcattgcacagatgatggatatttacgtatgtttgaaacgaccatcctggatggtggacaataaaagaatgaggactgcttcaaatttccagtggctgttatcaacatttattcttctatatctaatgaatcaagtaaatagccagaaaaagggggctcctcatgatttgaagtgtgtaactaacaatttgcaagtgtggaactgttcttggaaagcaccctctggaacaggccgtggtactgattatgaagtttgcattgaaaacaggtcccgttcttgttatcagttggagaaaaccagtattaaaattccagctctttcacatggtgattatgaaataacaataaattctctacatgattttggaagttctacaagtaaattcacactaaatgaacaaaacgtttccttaattccagatactccagagatcttgaatttgtctgctgatttctcaacctctacattatacctaaagtggaacgacaggggttcagtttttccacaccgctcaaatgttatctgggaaattaaagttctacgtaaagagagtatggagctcgtaaaattagtgacccacaacacaactctgaatggcaaagatacacttcatcactggagttgggcctcagatatgcccttggaatgtgccattcattttgtggaaattagatgctacattgacaatcttcatttttctggtctcgaagagtggagtgactggagccctgtgaagaacatttcttggatacctgattctcagactaaggtttttcctcaagataaagtgatacttgtaggctcagacataacattttgttgtgtgagtcaagaaaaagtgttatcagcactgattggccatacaaactgccccttgatccatcttgatggggaaaatgttgcaatcaagattcgtaatatttctgtttctgcaagtagtggaacaaatgtagtttttacaaccgaagataacatatttggaaccgttatttttgctggatatccaccagatactcctcaacaactgaattgtgagacacatgatttaaaagaaattatatgtagttggaatccaggaagggtgacagcgttggtgggcccacgtgctacaagctacactttagttgaaagtttttcaggaaaatatgttagacttaaaagagctgaagcacctacaaacgaaagctatcaattattatttcaaatgcttccaaatcaagaaatatataattttactttgaatgctcacaatccgctgggtcgatcacaatcaacaattttagttaatataactgaaaaagtttatccccatactcctacttcattcaaagtgaaggatattaattcaacagctgttaaactttcttggcatttaccaggcaactttgcaaagattaattttttatgtgaaattgaaattaagaaatctaattcagtacaagagcagcggaatgtcacaatcaaaggagtagaaaattcaagttatcttgttgctctggacaagttaaatccatacactctatatacttttcggattcgttgttctactgaaactttctggaaatggagcaaatggagcaataaaaaacaacatttaacaacagaagccagtccttcaaaggggcctgatacttggagagagtggagttctgatggaaaaaatttaataatctattggaagcctttacccattaatgaagctaatggaaaaatactttcctacaatgtatcgtgttcatcagatgaggaaacacagtccctttctgaaatccctgatcctcagcacaaagcagagatacgacttgataagaatgactacatcatcagcgtagtggctaaaaattctgtgggctcatcaccaccttccaaaatagcgagtatggaaattccaaatgatgatctcaaaatagaacaagttgttgggatgggaaaggggattctcctcacctggcattacgaccccaacatgacttgcgactacgtcattaagtggtgtaactcgtctcggtcggaaccatgccttatggactggagaaaagttccctcaaacagcactgaaactgtaatagaatctgatgagtttcgaccaggtataagatataattttttcctgtatggatgcagaaatcaaggatatcaattattacgctccatgattggatatatagaagaattggctcccattgttgcaccaaattttactgttgaggatacttctgcagattcgatattagtaaaatgggaagacattcctgtggaagaacttagaggctttttaagaggatatttgttttactttggaaaaggagaaagagacacatctaagatgagggttttagaatcaggtcgttctgacataaaagttaagaatattactgacatatcccagaagacactgagaattgctgatcttcaaggtaaaacaagttaccacctggtcttgcgagcctatacagatggtggagtgggcccggagaagagtatgtatgtggtgacaaaggaaaattctgtgggattaattattgccattctcatcccagtggcagtggctgtcattgttggagtggtgacaagtatcctttgctatcggaaacgagaatggattaaagaaaccttctaccctgatattccaaatccagaaaactgtaaagcattacagtttcaaaagagtgtctgtgagggaagcagtgctcttaaaacattggaaatgaatccttgtaccccaaataatgttgaggttctggaaactcgatcagcatttcctaaaatagaagatacagaaataatttccccagtagctgagcgtcctgaagatcgctctgatgcagagcctgaaaaccatgtggttgtgtcctattgtccacccatcattgaggaagaaataccaaacccagccgcagatgaagctggagggactgcacaggttatttacattgatgttcagtcgatgtatcagcctcaagcaaaaccagaagaagaacaagaaaatgaccctgtaggaggggcaggctataagccacagatgcacctccccattaattctactgtggaagatatagctgcagaagaggacttagataaaactgcgggttacagacctcaggccaatgtaaatacatggaatttagtgtctccagactctcctagatccatagacagcaacagtgagattgtctcatttggaagtccatgctccattaattcccgacaatttttgattcctcctaaagatgaagactctcctaaatctaatggaggagggtggtcctttacaaacttttttcagaacaaaccaaacgattaacagtgtcaccgtgtcacttcagtcagccatctcaataagctcttactgctagtgttgctacatcagcactgggcattcttggagggatcctgtgaagtattgttaggaggtgaacttcactacatgttaagttacactgaaagtgttcatgtgcttttaatgtagtctaaaagccaaagtatagtgactcagaatcctcaatccacaaaactcaagattgggagctctttgtgatcaagccaaagaattctcatgtactctaccttcaagaagcatttcaaggctaatacctacttgtacgtacatgtaaaacaaatcccgccgcaactgttttctgttctgttgtttgtggttttctcatatgtatacttggtggaattgtaagtggatttgcaggccagggagaaaatgtccaagtaacaggtgaagtttatttgcctgacgtttactcctttctagatgaaaaccaagcacagattttaaaacttctaagattattctcctctatccacagcattcacaaaaattaatataatttttaatgtagtgacagcgatttagtgttttgtttgataaagtatgcttatttctgtgcctactgtataatggttatcaaacagttgtctcaggggtacaaactttgaaaacaagtgtgacactgaccagcccaaatcataatcatgttttcttgctgtgataggttttgcaagccttttcattattttttagcttttatgcttgcttccattatttcagttggttgccctaatatttaaaatttacacttctaagactagagacccacattttttaaaaatcattttattttgtgatacagtgacagctttatatgagcaaattcaatattattcataagcatgtaattccagtgacttactatgtgagatgactactaagcaatatctagcagcgttagctgtccatatagttctgattggatttcgttcctcctgaggagaccatgccgttgagcttggctacccaggcagtggtgatctttgacaccttctggtggatgttcctcccactcatgagtcttttcatcatgccacattatctgatccagtcctcacatttttaaatataaaactaaagagagaatgcttcttacaggaacagttacccaagggctgtttcttagtaactgtcataaactgatctgaatccatgggcatacctgtgttgcaggtgcagcaattgcttggtgagctgtgcagaattgattgccttcagcacagcatcctctgcccacccttgtttctcataagcgatgtctggagtgattgtggttcttggaaaagcagaaggaaaaactaaaaagtgtatcttgtattttccctgccctcaggttgcctatgtattttaccttttcatatttaaggcaaaagtacttgaaaattttaagtgtccgaataagatatgtcttttttgtttgttttttttggttgtttgtttgttttttatcatctgagattctgtaatgtatttgcaaataatggatcaattaattttttttgaagctcatattgtatctttttaaaaaccatgttgtggaaaaaagccagagtgacaagtgacaaaatctatttaggttctctgtgtatgaatcctgattttaactgctaggattcagctaaatttctgagctttatgatctgtggaaatttggaatgaaatgcaattcattttgtacatacatagtatattaaaactatataatagttcatagaaatgttcagtaatgaaaaatatatccaatcagagccatccctaaaga

SEQ ID NO: 116 - protein, 1091 aa, Homo sapiens
MMDIYVCLKRPSWMVDNKRMRTNFQWLLSTFILLYLMNQVNSQKKGAPHDLKCVTNNLQVWNCSWKAPSGTGRGTDYEVCIENRSRSCYQLEKTSIKIPALSHGDYEITINSLHDFGSSTSKFTLNEQNVSLIPDTPEILNLSADFSTSTLYLKWNDRGSVFPHRSNVIWEIKVLRKESMELVKLVTHNTTLNGKDTLHHWSWASDMPLECAIHFVEIRCYIDNLHFSGLEEWSDWSPVKNISWIPDSQTKVFPQDKVILVGSDITFCCVSQEKVLSALIGHTNCPLIHLDGENVAIKIRNISVSASSGTNVVFTTEDNIFGTVIFAGYPPDTPQQLNCETHDLKEIICSWNPGRVTALVGPRATSYTLVESFSGKYVRLKRAEAPTNESYQLLFQMLPNQEIYNFTLNAHNPLGRSQSTILVNITEKVYPHTPTSFKVKDINSTAVKLSWHLPGNFAKINFLCEIEIKKSNSVQEQRNVTIKGVENSSYLVDKLNPYTLYTFRIRCSTETFWKWSKWSNKKQHLTTEDSKGPDTWREWSSDGKNLIIYWKPLPINEANGKILSYNVSCSSDEETQSLSEIPDPQHKAEIRLDKNDYIISVVAKNSVGSSPPSKIASMEIPNDDLKIEQVVGMGKGILLTWHYDPNMTCDYVIKWCNSSRSEPCLMDWRKVPSNSTETVIESDEFRPGIRYNFFLYGCRNQGYQLLRSMIGYIEELAPIVAPNFTVEDTSADSILVKWEDIPVEELRGFLRGYLFYFGKGERDTSKMRVLESGRSDIKVKNITDISQKTLRIADLQGKTSYHLVLRAYTDGGVGPEKSMYVVTKENSVGLIIAILIPVAVAVIVGVVTSILCYRKREWIKETFYPDIPNPENCKALQFQKSVCEGSSALKTLEMNPCTPNNVEVLETRSAFPKIEDTEIISPVAERPEDRSDAEPENHVVVSYCPPIIEEEIPNPAADEAGGTAQVIYIDVQSMYQPQAKPEEEQENDPVGGAGYKPQMHLPINSTVEDIAAEEDLDKTAGYRPQANVNTWNLVSPDSPRSIDSNSEIVSFGSPCSINSRQFLIPPKDEDSPKSNGGGWSFTNFFQNKPND

SEQ ID NO: 117 - DNA, 73130 bp, Mus musculus
  misc_feature (1)...(73130): n = A,T,C or G
gggtcggcgtggctcttgcttttcctcgctggggtgtacggtaagtgtccacctccctgcgcccctctgaccgaacaaagctggggcgaccccgggggccccccgggcctccaggacgtgctgtgcttgggcgacccggggagacctgggttgccgacgggacaaagacccacgcgggatggtgcggggagggttgtctgcccgcggggatgctggggtccgctggccgccgccgacccttcggagcgatggaggcgggccggtccgagccaggggtccctgcggagcgacggcgtgcgggagaactccccagcccggcgcgaggcccccggcggctcgctcctctagcgctcgctgccggctgtacagtcctcgcgcacaaagatgtgaccgtgagactacgaaggggaggtcgcctccgggacggtcctgtcccagatccttcccgaggcaggaagttctcttctcagtgaaattgctgtcgtgcccatctctcttagtccccattccctccaaaagcaccccattgcttccttcccacccctccacctctgcgcctggggctctgtgggtctcgggcgtgtaggatctcgttccccagtagctgcactggagagaaggccagaaaatagtttccagccccacctcagtctttctctattgggacgtacaagtctgccttgactcccagttcacttatcatttcatctgtgccctctgatgctgttgtgactcttgcctcattccggtctgcgatctggttagggacactactttacggattgcagtctgattgtgtgtcacgaccgtgctttgtatgaactagaactaaaggaaattaagaggactgctcaccactgagacctcagcttgggctctgacttcaccattcttagttctcatgagttaactccttgaatggatattgcagagaacacaattaacatttccattttggagtaatggtttgatttctccagaaaaacaaacagaagctacgggggggggggcgggtatttttacttataaaaagtccacttcatttgccacaaatactaattcagtagtatagtggcggtggtttctgtagcatataattccccagcatatggtagcacctcttttgaaagtatttgtctttaatcccagcacttgggaggcagaggcagaggcaggcggatttctgagttcgaggccagcctggtctacagagtgagttctgggacagccagccagggctatacagagaaaccctatctcgaaagtatttatctgtggaattaaatatgatggtaactttcaaaccttgagaattctcattatatgaaaaatataatgaatgtaaattggcatttcatgatggctaagaaatagtaatattttcagtgtagttcacacgtggtgtgttattttgttctgatcaggtgatgggcttatccacatttgatgtagtaactgtcagtgatgtgtttgtgtgggacctgactgttcaccgttagtgccatccctgcttggctgatgacctgtgggtttgggtctacaccagagatcaataagctattatgttgtttgttttctagcctggaggtgagtaagtcctgctctaggtttggtataatggcccaggagaaaggagagtgagaggactctttaatctagggtgattaggaatgtccagttgtgtatgctctgcactgttatcagaattgagtttatgtgatgtctgatcagactaaataaataagttgagtcttcaggaaaactcatgccattggtgtttgaaataaagatcctttgccttcagagataaagaggctgtaaagcagtattggtcctgatgtattcatttataatacacagtggacttctggtaggtactttacaaaggtgtttgtgttcagtgaggaattgaagtcaaaggccaaaactcctttttccaccattgtgggatcacggttataaagctgtcaggtgataattccaaaggttgatgtctccaaccacttgagtttcaaatgataaggaaataagaggcagtgagatgggcaaaatattgaactgtactgacagagctaaaagaaactcttcgtcctgaagccagggacattctctgtacagctgtgcacgagtgtgcacgagtgtgtgttgggtgggagtgggagggggtgtgctcgagtgcgtgcacacccgggtgtttctgtttcctcacccagatttgggtttatattattaggaaaagaaaaacaaataactgtagcaatagctaaactgtactggaataggaatagtagagtttgtgtggtctgtgttaaagttgtcatgtatagtggatataccctgacagaaccatttgagtgaacatggaacatacatacatacatacgtacattatggagatatctcagtacaattcttgaagtcctgaattccatccctagctcatgtaaaaatgggcagtgtaacatgctctctggaaggcagagacagccagattccctgggactcattagttagtataatcttcttggcaagctccagacctttgtctgggaaagatggacagcacctgaggacgaacatgtatggttgccctctgatctccgtatatacatgttcttgcacacacacgagtatggcttaaaaaataaaggactgttgagacagctcagtagtaaagatattttctatagcgcatggtgacttgagttcaatttctggaacccacataaggtagacgagataataaacttcacaaagctgtcctctgaccccgacagacaaaccctgtttcacacacaggtcctacacatgcacaaattaatgtaaataatcgaatcaataaataaaattagaaagttccattaaaacaagtgaatattctgaataatttgacatagacctgataaggaaaggttctgagccagtatttcgggaattccaacagttttgtttatttctttgcttggtaggttgtttttgttgttgtttgtttgtttgtttgttttgtttttttccagttactcttggctattaaccaaaatatgaacctttaaaacatttcgtatagatttaaaactccttatttggtgtttacattctttgcataaccttttatttgttggtgaactgtgatatgtgactattatagctgcaggttatctttccagatgccaaagtcttgcttgaactttaaattgtgtaaaagtatacaattaatttagcttatacatcagcctacagttaatgctttctgaggttgtcctagggccagtgttatctttcagtctttcttctgtcagaatagctttgaatgtgcaggaggacaggagaaagtgaaggttcaattggcactggctttctttggaagcttgaaggagtgtggtccccagagcttagctggctgttgccttgctttctgaatatatctggagaaagaaacaaagttcatgaggtggtgtccttatgtttgggacacactctggcgtgctgcctgtcatgcactctcccttccctgccttcccgtccctcatttgctcatcttgactctagcttttgggccactgtttcatttgttgaacaccgtcctagaggaagccttagagtatggtttagagcatttgttttgcttgtttatgatcttataattgccttggagagtttcaggttacttcctgctaaagcattcagtgtcagtaaaaactcaccctgatgtatgtatgctctctgacctgtgatagataacattcctgtttgaactatcatctgattatggcaagaggctttattgtgcgcctgctgttatggatgctgtggctgggtataatattctccttactctttactttatatctaatggataaatcttttccccatgaattatatggaacactcagcagtactaaaaattttttttcagtgtaaggataaactggaagttccaattttagaaaagtggtagaaataactggaacagagggaaaaatattttaagcagataccaattacttctgagaaagtcaagcttgattacataaaatatattgaataaaactgaattaattgcttaatataaacccttctttgagttcagaatctaaattatatctatatcctagggagattgaagacaggcagcagattcctcccaatcccaggggcttgggtgcagtgacaactttttgaagggtagctgtctacattccagaagcttggaagaggtttgaatgatgtgtcataaacgatttagatgcttcctagaaagtctggtctccactgaagagaaccaaagagaaacgtgagccgcaggtagaaggaactgttaaaatgtagatgttaaagccaggggctgtggcccaagctggcctccaactcacagcaatcctcctgctccagactcctcagtcccaagagtacatgtttaagtgccaggcctggatcaagacgtttttctgcagaatagaaagtttaaagcttatgaaaaggtaaagggaatttctctttctgatcttagatattttgttttacataattggtggtttttcttaaaaaaaaatattattagcaatattcactaaagaatgaattttaaacaggagatggatacagaaaaatttctgtacatttaagcaaatagaaaatgcttggactttgaaattgcaaaatgagcattaatctgttcttgctgcaagtctttataagcacacagaggttgcattgacctatctaactgctaaggttctatctagattctcctcctcactgcagtcctacgttttccctccttcttttgagataaggtgataggtgtatacacttattagcattccatacatgcatgcatgcatatatacatacatgcacacacacacacatacatacatatataaattcaataatgaattagcttagtggggtctcaccatctaatcattaaaggagagagaaagaaaggacatttactatattaagtgtccagcacttactgttatgggtgctattcttgaacactattcattgacagtttcagtcagtcccacctagcaatcatattcaacattgttttctaatcagagagaaaattgaagttctgagaactgccttgagttcgtatcactagaaagtcggcagagtgattgcctaatcctcttccctcttccctgcatctgtaggatactttccctgtcactgttaggttctgcctcgcgggcagtctctgccctcatggatttcagactctagtcaacaaattgttacaagctctccagcagaaactaacaagcatgaagataataaatgatgaagtgattagggatagatgtctttcacagggcacatttataagccccaaatgataggtgaccatgagagttatagtcagagagctttgtatgtgggaacaatatattgaaaggcctaggatcagggtgagctggaccctgcagctgtgtggactcacttgctgcagagcattagggtaggagtaccacagtgagtacacgtttgaagaccgtggtaaatttgagttttattttaaaagttaactattggagaggtttaaatggcatgatagagtttttattttgactcagtcgctttttctctacggtgtgggacatctgaagtagtcagggtagtcaggaaactagctgtcagccagcttgagaggcacgagtggttggaacaagctggtggtgggggaggtggatgggtactgtcctgttgataaacaaggggtttcctttctgtctgggagaggacagaggagagggagcatcactgtgtttgcacgtgggcacagaggtttggggtgggatgatgtaatcacatctggttgttcctgtgtgttttcttgaagtcatgaaacctgaatcatgagataagactgaagaggagaaggatacaagggtgatttctgttccttccattcagcctagcagtttggactcttgggagatttctgtcactccttagaaaagacaatagtaaggacattcagtgtgtgaaagtcgctgtccgtgctatataccaggcaggactctgtgatgaaaagcttgtacaacagatgacaagaacggcaaaggagatggactgcaggagaagcttaaggctctcatggagcactctgctcccaggctcatcttttacccactaagtatggagcatgacttatgcagtcttgggagtagaacaggcgagaatccaagagttagtatggaagtgagatgtcatgtacccttttacccaaattcaatgctttgaagtaagtgatcaataaaatggctttatgtcattggaaaagacaatgtattagtagaaatgtgaatttcagaagaaatttggaagaataaacgacctttttactggatcttatataacttatttatagatgatatagttttggcaggttccagaacatcgacatggatgacgctgacagaataattctctactttcttcccaaatgctttataactcagtgccctgcctggaagtagtattatgaagtaaagttgttttaaactgttgctctcactagtgaaggagtccgacctgacacttccttcaagtcacctaaacatttcagcttttagggaataaaaatggtgtccccacttccgtcgtaggcttaagtgagcacatggatgttcagcagttaggacttacccctttcagatagggagaaaatgcaaagtgaatgcatgtacctgatgcattctgaaggatgactcagatattcaagatttttgttgcttttttttctcatgacactaaaacctttctcactgatagagtactaaacagctttattttaaaaatgccatgaataattgtaaggtcagtgtaaagtggcctcctcagggaagacagactaagactagtaattttgctctagttcttttcactctatgctttctatgtgtagaggcttgttgctttattattaatattaataatattttcacattgttgtaacagctgctaactagtccagaagtgattcaatcatgccacacatacaaatatgggtgacctttcttaaataagtgcaggtttgtgggtttttgtttaaatttaacattcttacataaaatctagcagtagagcttgagagtactaacacctgagtttgctaagacccacatgatagaagaatagaatcaattcccacaagttgtcctctgacttgtacacatatgctggggtggtacacacatgcacacatggacatgtccatgcctacacatataaatacatcaagcagagaaaccctggccacgctctcatccctgcccttcttctgcagtgttcctgccatcccttgtgcttcctttgttcctggcctgtgcacacactggttcttctgcatctttcctcatccaccgtctgcactaggctgctacttacctgtccttcaactttcacttaggggctgttacctagagagagtgtttgtgtctcaaatatataagcctaatagaaaacttaaaaatgtacacacaaacatacactcatgcacacacatgtgcacacgcacacacacactccagtgatcatgctaaaaaagaagacaagaaaattaatgttaatatatttaatcccatatgcctaaaatggttgtatgtaaaatcaatagcaaataattattgatatactctggattctggattatgttttcatgaaaaaaatcttcaaggacagtgtaaatttcatattgagggctgatttcagttcaactaaccatgcttgaactgctcactagacttagaaaaagtcagtgtctattagcattgaataaaatgtctcgtagtccagcagctttagtttaggtatatactcagcacaatgtgcaatatgtgcccaaaggcaggcacaagggtgggtagcatccttcctggtttcagttccagcctgcacactccccatacagacagcgccagtgatgtcggctagaatagagtgtggcgcacagtacagcagcggctttcagcttcaggaattgtcagtttggaaagccaaagaatacttttaaattggggctacataattgcataggcctgtaacagaaattaaagggttaatgttaatctacttaaaatggtagtaagaaacgtgtcacctgttattaccattcgttgataattaaggtatgttaaatgacatatttaacatacaacaaatccaacaagaagactgaagttattttacatttgtgtacattattgtagagttctggttctgtgtggaacatacttgatataataacagacaaggcttgttgaataaatgaattcatttgtctgtaactgaggcaaattacattcatggtatttctaatgttgaagtattttcacattcgtagagtgctatagcaggttggtaatgatagcattttatgctggaataacctactgctaacttggcatttgtgagaccagtctgcagccaccaaggttttgctttctttctcccttcatcccttctcactcttgtaacctgccctgcccctacccctgcctgatttccatatctgctcatccattctttccattgctgatttgagtagatggagcaggatgcaaattttcattgttcgagttgtggtctcttaagactggaaatggaggtgtgtttctgagcagtcttggtcctgtgataagagtggaaatgaatggttttgtctttataagaacgactgaagagaatgctgctgtccctgctgtgcttaaactttatttcactgaacaagaaaatagagctgagcctgtaagaagtggtagatttgtttggactagaagaaatggaaaggcctgaggaaaactgaagctcccatctgaaaggcgggagccacgggggctgccagcacaggacatgtgaattggactcaagcaggggttgagagtcccgtgaatcaccgtaaggcacagtgtgcctgtttatataccaccgaataacagtcggaagcacaaaacagccggttgtcttagtgctactattggactttgagtactagctaaaagagttggggaccacatgaaaaacataattaagttaactttaaccccacattactttcctaccactttattgacatatactgtacatatttatggggtgtagcatcataatatatatacatatatatgtatggattctgtgtaatgatcaaattagactaccactttgtctctcctttttgtgctaggaaactaaacccttttgatttgttgtaaaatatgtaataaattgttaactgtagttggcatgtgtgcttatatgtggatatggaaaagatttgaaattagaacatagaatgtgcccctggttttgcttcattattttatttttatttttaatctctaatcttgacaactgtggcggcacagacctgtaatcctagcacataaggggtggaggcaggaagatccaagagttcagggccagcctgacacctgccaaaaaccaaacacacaaagaaatctctgctctcaggagggagttagctcccacaaacagacattacatttctaaatatttattagtgttcttaggagtgtgtgcacatgacacctttggagggataactccttggcttttttgtttgtttttttctcaatttcttcctatgtcacagttggctgatttatagtttccgagaatatagtatttcatctatattttactttaagctaaaaatgattttctcttaaatcatttctatatttgtggttgtcactcctgtcattcttgaattcccatctggctctgcttggcccctgttttcctgaacagcctcaccacacgtgagtctgcactgtggttgctctttccagcccttgcttgcttttatggtatactgacttccatgtggtctaacttttgagatgactaccttttaatcttacccttaaaactatggggcaaattggccttgttttctctgctgtaaggttttgtggatgttagcataagtgcagattctggacacagaactggtgcatcattttggacttcccccttccacgatggctgcgcctcctgcctacagtgctgaccttgatgaccactgatgtggtcatcaccagctacggacatggagactgccaagttcctttagttagcgtagcagagagtcctcccatcatcacctttgtcagtagtcagtgttctcttcctttttattggtaggcagtatgccattgtgtggatgaacctcactccatctgttgtaatggtaaacatccatggataggttttgtttggatgtgaactttaatttctctagagtgaatatttaagggtcgggttcctggttcctgtgttttaagtttcatacatgtattcaaatataggaagaaacaccaggctgtcttccagtgtttaacaatttgcatgctgaccagtgtatgtgacagttgtatagcttggtgaagttttggtcgtctccatagctgtttttaatctaaagtttatgtagctgtagctcctgattttattttacatttttaagtggctaatagtcttgaacatcttttctctttttttcttattttttattagatttcttcatttacatttcaaatgctatctccaaagctccctataccctccccccgaaaatgcactccaacccacccactcccgcttcctggccctggcattcccctgtactggggcatataatctttgcaagaccaagggcctctcttcccattgatggttgactaggccatcctctgctatataagcaactagagacacagttctggggggtactggttagttcatatttttgttcctcctataggattgcgaccccattagctccttgggtactttctctagctccttcattggggccctgtgttccatccaataggtgactgtgagcatccacttctatatttgccaggcactggcatagcctcacaggaaacagctatatcagcgtcctgtcagtaaaagcttgctggcatatgcaatagtgtctaggtttggtggctgattataggatggatccccgggtggggcagtctctggatggtccttccttccatctcagctccaaactttgtctctgtaactctttccataggtgttttgttccccattctaagaaggagcaaagtatctacactttggtcttccttcttgagttttatgtgttttgcaagttgtatcttgggtgttctatgtttctgggctaatatccacttatcagtgagtgcatatctaatgacttcttttgtgattgggttacctcactaaggatgatatcctccagatacatccatttgtccaagaatttcataaattcattgtttttaatagctgagtagtactccattgtgtaaatgtaccacattttctgtattcctctgttgagggacatctgggttctttccagcttctggctattataaataaggctgctatgaacatagtggaacatgtgtctttattacaagttagaacatcttctgggtatatgcccaggagaggtattgctggatctttctgtagtactatgtccaattttctgaggaaccaccagactgatttccagagtggttgtacaagcttgcaatctcaccagcaatagaggagtgttgctctttctccacatcctcgccagcatctgctgtcacctgagtttttgatcttagccattctgactggtgtgaggtggaatctcagggttgttttgatttgtatttccctgatgattaaggatgttgaacattttttcaggtgcttctcagccatttggtattccttagttgagaattctttgtttagctctgtaccccattttttgatagggttatttgattttctggtatccagcttcttgagttctttgtatgtattggatattagtcccctatcaaatttaggattggtaaagattctttcccaatctgttggtggcctttttgtcttattgacagtatcttttgccttacagaaactttgcaattttatgaggtcccatttgttgattcttgatcttacagcacaagccattgctgttctgttcaggaatttttttcccctgtgcccatatcttcaaggcttttccccactttctcctctataagtttcagtgtctctggttttatgtggagttccttaatccacttagacttgagctttgtacaaggagataggaatggatcaatttgcattcttctacatgataacagtcagttgtgccagtatcatttgttgagaatgttgtcttttttccattggatggttttagctcctttgtcaaagatcaagtggccataggtgagtgggttgaacatcttttcacattttttttaaagtgttttgggttttttgtttttctatcttggatgaagtggtgacgttcattattcatttccatcatttttcatttactgttgttgttttaggtcttatatgcatttccctcttgtgtgtgcagtttatcttcgagaaagtgtcattggcagagcagaccctttacatctgatgaagttgatcctatcagtattttacagcttaggctacaatgcttttacccaactacagatcaggaagggtttttctctttttctaaaacctaactgttgtacatgtaacctaagatccattttgatttatcattttataagaattaagtttgtaaagagttcggttttcacacatggtttcaacactatttgttggaaatacccctaccccttttgcattgcttctctgtggagggttaagtgagcacatccctgggccagttccagagtcctcatgctctcatgctgcacacttcatctttcacaccaacctgattgccgtggctttgtcatgagtgggatggcgtagtcccttacttttattctccatcaaaatttcctgattttttgattctcattcctttccacagtatgttgtcaagttagctcattttgtctagaaaatatcctgatgagattttttttttcatatagttttaaacttctagaccactttggaaaaaaaaaattgacatcttcattcttaatttctactccacaaatatggaatctttccatttatttaagtcattaatttctttcattggtactagatttttgttttgatagattttttttactatttcatttgaggagacctattgaaaatgatgttagtcaggaaggtggctcaggacgtgtgaaactcaactcaagcatgaggacctgagttcaaatctccagcactcatgtcaaaagttaggaacgattgagcatgagcctataaccacagcactgttgggaagcagataggaggattgctgggtgttgctggacaccagcctaactctaggttcaatgaaaaattctgtctcaagggagtaatacaaactaggttcaatgaaatattctgtctcaagggagtaagacactgataggtcaggacacctgctgtcttcctctgacctctgcacttgtatacaggtttgcatctgcatacacacacatgcaaacagatgtgcacagaagtaacttaattaaaaatgaacatgataatatttctaagtttgacttctatgtataatttttcatatataaagtggttatagtgagtaagctcagttactagttttagggatatttctgtatatttttctggactttcacattttaattttgttaataaagactgtgttacatttttttccaactgtataaagttggaacagggtctcactgtccttgaacttatgacccacctatttctgcttctgaaatgctagggttacatgcatgcaccatacctggcaaacagtttttaaatatttcactagcctttcattcctagaataatccagctagtcattgtatgttacagttcatgtttgctggttgtttgagctcggcctgttcaggaactcactgtgtctttagactcatggcagtctgcctgcctcagcttccagcgtggtagcactagaggtgtaagccactgtgcccgcctcttaattattaatttccagatatgtactgtgggcatcatcctttttacacttcaccctttagagtgcaattccattgcttttagtatattcacagactggcacccatcattcttgcccagcttgagaatatttgctaccctccaggaaaaacccgtcagtgaccattgcctgttgagcactctttccaacctggcaaccatgagtcaactctgtcaccgcagatttatctgttttggatgcttcattaaatataatcatacgctatgtgatcctttgtgcctggcttttacctagcaaatgttgtttccatgacttatccacgcagtgcatgactcagcactttattcctggtgttgtccggaacactccctgctctatggctctgtcacatttcatttattcctattgtgtggcatttcagtagttgtcactttttgtattttcctgtatatttagagaggagtgatattcatgactcatattagaactctgtctttgtaaagaactccaagctgctctccagacggcagtgctgttctgtgttccttccagcagtgaagaccccactccttacccatgctgcctgtctttctaactgaagctatcctaatggggatgaagtggacgttgtttcagttaaaatagtgatgttgggggttttggttttgttcttgtttttccctgtatttgatgactgtgtgtgtgttatattctgtgtgtccttcaaatcctatgaccatttctagtgcgtcggcttactgcctttggttgtgctgtgtgagacttggaccctttgctgcatggctcgccagcatttctcctggtctgtaggttatcggtaagtctgcttccacatacaagtgttttcagttttaaaaaattatttctgtttccttttgttttgtaggctcctgttgtagttaacagttcatcctctagtctaaggtcaaggttcactcttgggctttccatgtggtttttgtagcattgtgtcattggcccttatcttaaggtctctggtccattttggctcatcttttaatctaatgtgaggtaggtcaactcattctctgtgcatttgagtttctgtttagggttgtttgttgaaaagactttttccacatttaattttcttgacacctctgtcacaggtcagctgttcttaatcgtgttgcatttatctgttcatccctatcttcatttcttttcctattgctgtgagaaaatcctctgaggaatgtaacttgagagagaagggtttgtttgatctcacagtccaaggggcacagtgtgtccatcctgctgaagaagccaaggcagatagatagcagaagcagctgggcacgttgcatccactgtcagagtgcagagaacctgatagtgcatcctgctgcccagcagactgtctccacttagggcctggcacaggccaggcaaaggcatacctgcggtgggcgttcccacagggcatagagccatctccctgatgagtccagagtctgtcaaatgacaattaactcctatgccagtgccctgtaatggctcacctatgtctgccagtgaacctgtaatggctcacctatgtctgccagtgccctgtaatggctcacctatgtctgccagtgaacctgtaatggctcacctatgtctgccagtgccctgtaatggctcacctatgtctgccagtgaacctgtaatggctcacctatgtctgccagtgccctgtaatggctcacctatgccagtgcactgtaatggctcatctatgtctgccagtgctctgtaatggctcaccttcttattaaattttcaaattaagaaggttgaattctgcagttgttcatccttttcaaggtgggtttggcaataaccacaaataggaggctagggtttgaacctagacagtttagttgcacaatctgggccgccctccccattttcacagtttttttgtttgtttgtttgttttgttctgtttttcgttttttgtttttgtttttgttttttacttaatagtttggaaaggcaaatgaagcttcttaaaagtctatgcatacacatttataagagggatttaaatggggttaggctataagagaagcagtgcctccctcagccatataccataggctatgagttatttcttttcaagttgttggtcactgggtcccataaacactccccccaaacattacaggccattattgcttttggtgatcttccagaattcggtggcaagaccctaatgctgaagatagcgtgtagttgggttatagaacatggagaaatcaagctggtaccaacctgggagcttcatccctatgctggaaggctctttttacactgctgcagaagagaagtctccatcagcctccccagctgtgcacgctgaaagctgtagtaacagctgctctggcaagatctagcctctggtgcagcgggaggacctgggctctaagactatgctgtggcttttgctgggctgcttggaggccttccttaactcagtgcctctttgtaaacaagctgatttaattcttcttgcatttatcgtttttaatttattacttgaactttctggttgtgagtctactgatagatgagccagggatgctggattattaatgttttctgaatgtattccagtttgctcttaattgaaatttctaagtggcaagatggttggttattggatttttatactacctcccctcagggtttgttgcaaggctattaaatgacttacacatatactgtctacatcaaatgctaattttcttttttctttagtagatatacaaatgacagcatataggaaccgtaattggatagttaataaagttagaaagattaacttcagaagcattttaaaacagcaccaaccaatttagcaaataagtaaaaaaaaaagcaaaacaacaacaacaacaaaaaaacctattctatcaattgttcagaatcattaataaggataaaacaagactggttagggctcaatgaaatgtccattcatgctttgctaacaaatgctaatctttgactcatgtgttttgggtattatttgacataacttggacatatcttcataaactttcttgatgttgatcattaggttatttatattttgctcacattcataactaattctataattgataagcttttgttaatttttctttgcttttttgtatttctatgagtcataaaagtacagttactacatcaaaagctggaacacttttaaagttctcaataaaaataatgcccaatttgtattgagtaattctcttttactaattattactttgaatgctttatatataatttatttaatctttttcccaaactcaaaatggatcatattttaactccataagtaagctgcggggaaattttttatgcatttgcagccaagatttttttctagaagaatttgagtacagtaagcctttgctcatagatgttaagattatgtgtcttttaatgccttcccagtgaactattacaataataacaccaaagcagcgagcacagccagagccataattatggtcactaaatgccatttgtcacagaaaggactcaggggtcatggggtggatgattagttccactgtggtgcagaaaacacaacagatgactgcgttattctgcctcataaagcagggaaactaccagagactagcagttcatgtcaaaaggnnnnnnnnnnnnnnnnnnnnaaaaggcatctgctgatctaataggtccgttagctgacggtgaaaaaacataagcatcaaaccattaatgaagacaggtgattgcaatacacggatgtataaaaaactgttcctcctgttcacttacaatagggcacacactgttgtaacaaacacacgagttgataccagtgaagacaaatggctggcacactgtagcctctgaaaataagcacctgtgagaaaagaattaaacatttatgtgtttctctttatgaaacaatgtatccgggtaagcaaatgccttaaagggaaagtttttattgaaacacagccaccggtttgtgtgcgtatactctgttgcttttgtgctgtaggacagagcttgcagcagactttgaccagcaaagcctaaactgtttgaagatctctttttacagaaagtggttgctgatccttgaactaggtggacaaaattaaatgagctaaaaaggaaatgatgccacagaatgtggacatgaagcaggtagtctccttttttaacaagttagtctatggctaagcaatggtctctaaagcatctattcaaagtggcaggtaatctgaatttttttcctctttgtgaatttccttttttttttcttttttttttaattagatatatttttttaaagttttgtgtaaggttttattgctatacccatacaaaattccatttatgatgcaacatgatcagtccaatttcagaattactaaaacagttaccaaatgtaacactgagactatttcgaagtagcggaaggctttgtatgaacacactgaaaagatacatatgcgataatcaggcaagtcagattatggtctggttatattagatgatattgagaactctttaggatatttcttaatagcattatggataaatagagctgtactttgagacacatggtggactgataattagcattcacatttagtataactcctaaaagccagtggagaaggtcacagaatcagtaatcaaatgccaaactcttaggccaccaaggcctacacttttccctaagtgtgacaggctttgaggtagcttgcttttttttttttttgaaaattccttcatcccttggagtccacgtcagtgtaagcaaagtagttgtctcgcttcactgaatccagctgtcagttgcagagcagcagtccagcatgagtccacgtcatcctggtttcatacctgatcctattcagtaaggagatgcgcgttgtcagtttaatcgctgccctgagcctcctgttcctcagatggggtctcagttgttcctgaggtgcttgtgaaaggacagtgttaggcaaatgatgacgtttgtagctgcagtgagtcacatatcttgggaggtatcatgagagaattaagtgcaggatttttgtagtaagatacacctcagcttggatattatgatttctagttgtgttaccatgaacaagtaagttattattatccttaacatttaacttctttgtttgtatatactggacacaatacctatttcagatacttccatgatagttaagtaaattgaaatcagtgaagatatttgtggggctgagatggtagctcagttggaaaagtatctatcttggacctgaattggatcccaaaaatccatgtaacaaaaagtcaggtgtagcagtacacatgtgtaattcagactcaagggaggtaaagacagacagacaaactgacaaaggagcatgtgcgcgcgcgcacacacacacacacacacctgtatgtactcataagttattttctctttcactcaaggaagcacacatgcataacaggtaggtatgtttacctgaatcatttttaaaagttacacaaaggacaagtccccgtgggtatctctgtaggattttattgtgtgtgtgtgggggggggggaggctcatacacatatacggcagtacaggcagactcagtgccacagcactcaagttgcaatcagaaagtgacactcaggggttgatgctcttatgccaccttgaggaatcctgggactgaatgtaggttgtcaggcctccctcatgccccactatccactgggccatcttgccgatcatagatgataaatgttttagtcttatggagcaagtaagttgtgagataagctttagaggaaactgggaagctagctgttcacagaaaaagagagagaattcgtcatatttattaagcatatagtctgcatgctaagagccccggcaggagtcaggaaattgaaaatggtggcaacttgcattttcctcagtgtctcctcttcttccctgctccatcccagcaggccattagcactaacagagacagagcttttccttcaagtgtgaggcttcccagcaactttaaaagtcctttctcaagtagtttatattccaaaagaaggccactgctaagcaatggtctctaaagcatctattcagagtggcaggtaatctgaatttttttcctctttgtgaatttccttttttttttaaattagatattttcttcatttacatttcaaatgctatccccaaagtcccctatacccgctccccaccccaccctgcttcccaacccacccactcccgcttcctggccctggcgttcccctgttcccctgcatataatcttcgcaagaccaagggcctctcctcccaatgatggccgactaggccatcctctgctacatatgcagctagagacacaagctctggggggtactggttagttcatattgttgttatacattcatccatgaggatacctgtcttcctttctgtgtaggcttttctatccctttccttacctttgtttactttcttaacaactggaacataaaaccaattttttcatttcactgagggtattttatgccttatttcaaaagctgataatttgaacagttaaatcagtatacatttagaaatcttagcactggaaactgggtgctctggatgatgacagggctagcagaaaagtgcccgagatactcagacttcagttgaatttaattagctggtttaattacaaaaaaattatagcagttgaattgtttactcctggagatgataaggactgtagtatgtcttcagaagtcagtactaatctgatgtatcttctttgtcctaaacatagacacgtacatcctgaggtaggtgagagggcttaacagactaactgatggtagttcagtggactgttagaggcagatggagcatcatgctgggaacatcagagttccagaaactgaatggagaatatgtatgtgtatagtacaaacaactacgggtaagctaatgctaaaggttaaaagatggagatgagccaagccatggggcttttgaattctcatacataaagaagttgaaactttttttaaagattaatatgagatgggtcttaaaaaatgtctgtagcagtccagagaaggaggaggtaagaacagtgccaggggtcagagagcagcaagatgagaagcaggaagccagcttaggggctgactaagttacccccacacttagcaagtgtcccccttctgtctaatgagaacaggtactgttctgtgttttatccacgtggaactaatattcaatgcagaaagatgcgtaaatgtaatagggatgcgaaatagatgaagaatggacgaatcaagagaacttaatgtatacctgaggagaagggggagatgatagaagaagattgacttttgggtttctgtttggacaagtaggagatgttagtgtcgttctccaagaggtgtgagaggaaggttggagggcatgtggagagtttcagtctcgagcttgatctgtgtaggtgatattaaggcacattggtgcaatagcaaaataaggagtctttagggtaaaactaaaaataacggtatggtgctggcaacaacccaggcatggagacattgaaatagaatagaaaacccaaatcagacccatgcagcacatgtatgggtcttgacagaaacatacatgggggacaatagtctctatgataagtggtgctggggaagctaattatccatatgttgactgaaactgcattcttagccttcaccatgcacaaaagtcaactcaagctgtacccaagacatcaatacaaaacctgattagaaacaactaaaggaaacttagaagaaatactccaggctgtagtcctataagcaaggactttctgagaaggacccgagtacctcgggaaataactagaattggcacaaggttgcatgaattgataagcatctccaagccaaggaggaagagcttagtgaaaagacctggggagagaatggaggagctcaccagctggtcagtgagaggagcaatatccacaatgtaagaagaaaacacaccctttggcgggagttagcccaggcacaaattaaccacagatgacttgaaaatgaaaaagtacaagtagccaataaatgcagaaaacggtctaacctcttaagccaccagggaaatgcaaaccacagtgcaaggagattccatcccaccagtcaggatggctgccgtcagcggccctagagaggacttatggtagggatgctagggaaaggaacattaggcacttggtggagatgtaagtccatccagtcaccagggacatgagtgtgggattcattactcatacaatttaaaagcaagctaactgcatagtgcagttacactctcctagcacatatcttgaattaatacttctaaatctgtatctctgctatcccagacccaatcaggggggtggcccctggggccactttcttagattcttgcatgtcagtggacctttctgatctttctgcttccctgtcctggtccttcctatgcccctctcatggcggcctctcctctcctcccctcatcctttgtcagggaaatctaaaagtcccgcctctttcaccctgcccagccattggccactgactttttactgatcaatcaaaagccaggtggggacatggacccttagcatctgaacacatgtgattcccatgtgatttggggagccaaattaaaacaaagcattagaaccaatcccttccagccatgtcctgtagatctctgcttatccttgcattatcagcctagaagtccatgagcagatgaatagatgaacaacaggcggcatttttattcatctataaagaacaaaattatgttcttcacagggagatggaactagaaatgatcacgttaattgaaagtcagttccagacacataatgctattttctctgatggaatgaatttaagagcatgaaaatccaagggaacaagtctagggctgtagcaggcgggaagaggaaggagaggaagaggataacgcagggtaacagaagaggcgggcacagctagtatatgtgtgtgtcattatgtatgtgtgggattattattgtggtttgctctgtcactatgcattgtaatgctaaattctgtgcagaatgtttgtgtgtgtgtgtgtgtgtgtgtgtgtgtgtgtgcataccttgtttaaatgtaaaactactggttaaataaaattgggattagaggtaggtgggttttgagttacctggttggtggtggagagaagagaccaggagaaggaggaggaagccgccatgcagggagatggacgatgagcatgtggccaggagaaacagcaagtatttggtgtatactactggggaggtagccaggccagcaattagaaaagtagattatatgccacagtacaggggaatgctagggccaggaagtgggagtgggtgggttggggagcaggactcggggagggtataggggactttggggatagcatttgaaatgtaagtgaagaaaatatctaataaaaaacaatctattttcaataaaatataaaagaaggaaaaaaaagaaaaaaaagtagattaggggttacccccagtaattgtcaaagctaaataaaataaccatagtctgggtctcatttatttgtaagctagtctggaataagtttaaattggattactacaattatcataataaagcccattactatggtcaataagtgttaaaaacaaacaaaaacctcataaatagtcgttgtagcccatcccagggcagctgtgaggagctctaaacgtttctgagtgtcagtttctcagcagttatagaaccaagcgcagtacctgcttcccgagggtgctgtaaacattagcacagtgaacacagagcaccgactacgctgatttgtacgatacaagcacccggtgagtgctgggagtcaatgaaaatgttcagctcatgaaagggtcctgtggtggtgagacttaggaactcttatcacggagagcttgaacctttaaacataggcgtcgttcttcttactgtgacaaactaggagcagcttcagacagaaacagtttgctttgagctctgagtcagatggcagtggctctggctctggcagtggaaatgagattgtgcagctggtcacggtgggccaggaaggagaaacagctacactggaggcagagtggctctacccttggggatctcactcttagccaccagccaggccccatcttcagatgattccacaacctttaagtactgtcagaagctggggaccaagtgtttaaacaagaaccttaaggaggagtcagacctaacatccttctggagggcccaaagacttatggctatctcataatgcaaaatgtatctagacctgcatcaaatgtcccatagtctcaagagtttcaacattgtttaaaaatctgaaatatctttgagagtggaagcaaacttttatctgtgaaccccaataaaatcaaaagaaagttatatataaaatatatgcaatataatatacaatggcacagacgaaaactgcccattctgaagggagaaaatgggggcataacaagaaaagatgagagaaaggcaagaccgaaacctagtagggtaagggcaaacattaaatcctacaacccatgtccgttatctcaggtgcatggggcatcgctgagtcctgcccaggccctgctacctggagctgacatggcttttctcttggtttgccttcaacaacatgctgaggtcttcactacaacttaatgttcacccgctaagcttcccacatagcttcctaggggatcttttaggagaatccgaccctattacacacttgtctggtctttctggaaccttggtgtaaacataataactccataactcctacagtctacatttcttcaaagctagcatattgtgagcaaggcaaagcactgctgccaacctgagaatagccataagaatggtggtgtctgagtgtctgggcagttgaccttggataagaggttgacttcctgtgtggctctccaccagcaagatgccttcagtgctctcttttcagattctctcaagtgagtttgcgttttacaccttgagcttttgatgggaagagttttgattaaggagcctttccagttgtctcagttgagactcagttatgagtccgtggtatggttttagggttttttcccaactgctactttctccaaacttgctttgttaacaacgttaaacgttatttacactccttttctgcccaaacagcatgtttcccgctctgttttttgttatgtgattcccactgtaaaagtggccaaaagcagcaagcagtaactactccacagcttcagtgtacggtgccttgatgtctccactgccgtagagattagtccatccattactttacgttgaaggtcggctgtcacacagggagaaaatgtagccagactctttgccagagtgtagcacagatcagttctcattcctttcagtcatttcttttcatttcaattcatgaaacctcatgagcacagtatttcctggttctctgctcttccacttaggaagttatagttttgtaaagcttctttaatctacatctccagactctttcatattcatcctgcagtcctggtcaacggtctaagaatcataccattccgttcattactgtagcactcacagtttttggtacctgtgtgtgtgtgtgtgtgtgtgtgtgtgtgtgtgtgtgctggttgcttctcatcactgacagaacaacctaacaggaatgacttagtggggaaaatacttattttcccttggggtttcagaggttgagtccatcatagcaagaagacttgacagagcgtctccatttgtggcagcaggaatgtgaacagtggctgttcactacaccagaaagcagagagctaggcgacatgacatcctttaaaaacacggtaacccagggaccaaatgctcagaacatggggatgtttcacattcagaccataacaacaaatctatcaaaaagagtttctggaaaaggaaagaacagtgtagtctgcctaaggatccctgactagttgacaagagtattaataatttactaagagtttggttaagacagttggttgaaaccttgaagaaaataataaaagactaatgtggttttcaaggaacgggagatagaattgagtttggcatcattagaagattaggcaacagcactgagtatccagaaagaagcgaggagctactgtgggtaagcttcccgggcctccagaaactgaccagaagcggctgtgatgaatatgaggtgttggatatgtgtgttactggcaatcctgtctgtttcactctgtgtggacctcctcgctaggggtagataggtaccagaaacaaaatgcggcttttgagcatgccagaaaaaaataaatatgcaaatgttattgattatttttaataatttggtagtttcttttgtgttaaaaagtatacttcaaagtagtgatttttaaggatcattctatcttttaaagttatgttttctacatcctaatatattataaatcacatctttattacaaagatggcactttttctagtttttcattaattatatataaatgtcaaatgttattagtgatatcagcaaacgtaggaaggttatagtcacctgctagtctaactgttgaagttgtaaaaatcactggatgtcttaaagaaaaacttataactgcataacagaattttatctttggaaaaatagcattcaagttcatgtattcaacagactagttaggaaagtaatatatatttgcttggttttttgtttttgttttgttttgtttttgtttttttggtttttcgagacagggtttctttgtgtagccctggttgtcctggaactcactctgtagatcaggctggcctcgaatttagaaatccacctgcctctgcctcccaagagctgggattaaaggcgtgtgccaccacgcccagctgtaatatatgttttaacaagccaaacatagaaatatattgtgaataaaagccaatgtgtctgtccctaccttgactttaggtgtgaagggagggttaaaaagaagtattgttaatgtcgagattaagtagctgagaattgccctaccacttagcagctgaggatcttgggtgagttactcaccttggattcttttcttcatctataatatgagggtaatattatcctcataacttcaggggatagatttaatactatgtcacagttcagtacagtgcatagtgctgcttaaatgttggtggtcagtagtttttaagttcaggctatgggctgggaactggctgcagagggcaagcagggtcctggaaatgttctgtcttggttgtagtgctggctgcagctcatacttacagaccaggaggcctcgtgaaatccatggaaagttttcttcaaataattacacattaacccagctgatttctaaaacatgtcttaccttttctctgcacttcagtttcataagtaaatagtttgtaaaagttccttcccagaactatcactaggcttttcttaggttagaaggatagccagtggggtgaggggtggttgattggttggttggttgactgactgactgactgactgactgactgactggttgattattcactagagaaatgcaaagccaagtgagaggacaccactttacacccaggaggatactttaaaaggcagataaggggatggggagaaggctccggggtgagagcacttgttttgcaagcagaggatctaagtttaagttcctggcacccacataaaaagcaaggcatggctgtgcatgtcagtcactagcattgagggacagacaggcaagactgagagctctgagagctaccatctaaaatggcaacccctgactccgtgcagcaaagaagaaaaggagcgacggccccatcttccagttggtgaacaggtatatgtccaagaacagactattgctgagacataagagggaaggaagtagagaaggaatgtgtagttttcctgagtttgactagagtacgtagtccatagagttagaggacagatgggatcaagttgttagggactcagcacagggcagaggagggaaggccagctttctttagggaatgatgaaaatattcagaccttagaaaatggttttgcttacataccttactaaatatacttaagaaaatcattgactatatacttctaaatcattttatgataaatgaaaagtgttccaatagagctgttaatggaagtaatgtgaatgcaaattttttcttttttttctcttatttttttattacatattttcctcaattacatttccaatgctatcccaaaagccttctacacccttccccacccccacttcccctacccacccattaccatttnnnnnnnnnnnnnnnnnnnnccccactcccctacccacccattaccattttttggccctggcgttcccctgtactggggcatataaagtttgcctgtccagtgggcctctctttccagtgatggccgactaggccatcttttgatacatatgcagctagagtcaagagctccggggttctggttagttcataatgttgcacctacagggttgcagatccctttagctccttggatactttctctagctcctccattgggggccctgtgatccatccaatagttgactgtgagcatccacttctgtgtttgttaggccccggcctagtctcacaagagacagctatatcacggtccttgcaccaaacgcttgctagtgtatgaaatggtgtcatcgtttggaggctaattatgggatggatccctggatatggcagtctcttagaccttcttggaattctgactccccctaataccttactgtttgtaaatcataggagtcattgaacttggatcatcttaaattccttttcttatttattacgagttcttataccagtggtggaagctaattttagaatgacaattatttctatctgcatgaacactcaccgagatgcttagcaggagaggtcacaaagcctttttgtgttctctctggggtgtgattcattctatggaaactgggggcttgtggtgctcagccttttcacttcacagaatctactgtcctcagaaagatctcctttgtttttagttttgtgtgtgtgtgtgtgtgtgtgtgtgtgtgtgtgtgtgcctgtgtgtacatgctcatgtgtgctagttaatgtgggtgcctgtacatgcctgtggtagccagaggatctgatcctcctagagctagacttacaggcagctgtgagccaccagcatggctgctgggacttgaacttaagtcccctgcaagaatggcacctgacactaactgctgagctctctctccagccccagatccttctttttgaggtatttcaaacaaaatcttacaaactcttactaagatagtatagtagaatacctaaagtatcttttccataaaagtaatactataaataagcattgctgttattttaagtggcagatatattctggccagttcataaagatctgtcattgatgacttaaattagaagattctagagattaaatagttgtagactactagtaagtacatgaaataaaaaatctaatcttaactttttggagggggtaggcattttaaaaatacaattattggtattttgcctgtatgtgtctctgtgtggaaaggttggatgtccaggaactggaattacagacagctgtgagctgccatgtcggtactaggggttgaacctggattctcaggaagagcagcctttactcttaaccactgagccatctcttcaatcccaacatttttttttttaatatacttgaaagcctttccccagaatattacactgaattctttacacatttttagagaagccataaacaggtcaaattatatctggggaaagtgtatgtattagtttgtttaaaccaccacgtcaaattgtcaccaactgtacttaacagatgtttgttttcctgcagttgtggatggtggaagtttgaggtttagacgatgccagatgaaagagtctgctgaagcacctcttcctgtgtcctctcacgtatcttctctgtgtgcaccttaagagaaaactctctgatactttttttctcttaagaggatgcccagattaggactgagactatagaacttcatttagcagaaagccagggttcgggtgcttctgagaaatgatatgaccactctgcacacatcctagtactgttctgtatgacacaggcaaaaagaccgtttccccatcaaactggcagaccacataaaggttcagcatgaaagactcattggtagtgcaacgataagtacgcattcgccttttctttcccaaatgttctgtttaacaagtcacggctgggtcagtctgcagcacatcggagtcgagcactccagggccagggtttgaatgcttctccctgaggctgcctgtcttctcacaaaggtcgacataactctttacagggcttatacataaacgtcacaaggatcatactgttaactatctacctaaaagtacctataataagtatatgctggtggatgagcatacaaatagtttaaatgaaagtttcacatctaggctgacaatgtaccctccaagtacaacatattatctaacattaaaacaacaacaataacaacaacaaaaccccaccaaccctgttgggttgtttgtcagggctgttcaagagacttttaatcccatgcacttctgactcacagcctaggcattcctgagctacagctgacctgaaagtctcctccctgagaactagcttctatgggaccagcaggtgccatgtatacttccaaagcagggaagcagccaccagtccttcccagttgtagtgtctgtgaaccacagtgctgactagcacggcatgactgttctgagggtgcagcaatggggaaacgtagccaactacccagggctggggaagtcacggatcctggaagagaacaagcaatcactactttactaaaccagtataatcccaatctagattctaattatttgtctttgtatccaccattaacttgtttgtggattcccgtgagactcttttgaccaacaattctattagatgtaaacaattcctgctactggaagcctcatttggtgacaagagattaccagttgggactctctcttccctattatttggtgatctcatgtagatcaccttcatatatgtatgtattttaggaaacatctactgtattagatttccatattacccctcaaatgccccttaattttagcctccctcatcgccttcttcccttccacttcccacctgatccttcctgtccagttcctcctccccatccatccataaccattccattttccttttctagggagagctatctcttcctcggttcccttaatctatatataatctccacggtcctttggattgtagcttggcagtatcattgacttatcagctaataaaaacaaatacaaatatataacgtatttgtctttctgagtctgggataccttactcaggacgaacttttttctagttccatccatttacctgcaaatttcttgatttcattttttttttgaacagttaagtataattacaccacattttctttatccatccttctgttgagggacatctacattgtttatatttcaggctattatgtgtagaaaagcaatgaacatgattgagcaagtgcctctatagtaggatgaagcatcctgtatgcccaagactggtatcttagctaggatttccattgctctaaagaaacactttgaccacagcaattcttataaaataaaacatttaattggggctagctcacagtttcagaggtttagactttatcatcatggtggggagcatggcatcctgcaggcagacatggtactgaagaagcagagagttctatatccagatccaaagatagcaggaggatagagttttatttcatactgggcatggcttgagcatttaagacctcagagccctgcctctacagtgacatacttcctctaacggtgtcacacatcctccaataaggccatacctcctaatagtgccactacctgtggaccaagcattcaaacatatgagtctatggggcacaaacctattcaaaccaacacaagtggtatagctgcatcttgaggtagacgagttcccacctttctaaggaaccgccacactggtttcagtagtggctgcacaagtttgcagtcccaccagcagtgcatgggtgttccctttgctccacatcctcaccaccataagctgccactttttataattgctcttagccattcctattggtgtaagataaaatctcaaggtagttttgattggcatttcccagatggctaagtatgttaaacgttgaggtgtttttcagccatttaggtttcctcttgagaattctgtgtccatcagcactccactctttagttgtgttatttgttttcttaatatctaatttttgaagttctttatatattttggatataagccctttatcagatgtgtagctggtaaaaattttccaatttagcctgccactttgaatgatggtgtcttttatcatgtagaagtcttttagtttcatgaaaagttgatcttaatgcctctgctattggtgttctgttcaaaaagtcttttcctgtgccaaatgagttcaaggctactcccagctttctcttcagtctatctgttttatgctaaggtctttgatccctatggacttgaggtttttgcagggtgataagtatggatctatttggattcttctacatgcagacagtcagtttgaatagtaccatttgctaaaggtgtctttttttccagtgtatatttatggggtttttttttttcacgattattctaactatcatggtgttcttgtctgtttgtttggtgtgtgtgtgtgtgtttccatatgaagtggaaattgtttcaaaattggtaaagaattctgttggaattttgatggggattgcactgagtctatagataacttttggtcagatgacatttttttaatcctactaatccatgagcatgggagatctttccatcttctcaaatgttcttcagtttctttttcaaagacttaaaattcttgtcatacaagtctttcacttgcttggttagagttaccccaagacattgtataatatttgtggctatcgtaaagggtgtttcctcagtctgtcatttgtatataggaacactctaatttctgtgagttcattttatatccagctgctgaaagtgctaccagttatgggatttttccagtggaaattttagggtcacttatgtatagagtcatatcacctgcaagcaaataaaggtatttgacttcattccagtttgtattcccttgatcttcagttgtagttctgttctggttaagacttgttgctatattgaataggtatggagaatggacagccttgtctttttgtggttttagtggaattgctttaaggttttccccatttaagttgatgctggctatatatatatatatatatatatatatatatataggcttgctggaaattacctttatgtttaagaatgcctgttgtgttggtaatctctctaggacttttatcatgaaggggtgttggattttgtcaaaggctttttctttatttaatgagatcatgtggtttttgtctttcagtttgcttatatggtagattacatttatcaatttatgttaatccatccatgcatctctgggaagaagcctacttgattatggtagatgaccttttgaaagtgttcttggattcagtttgaaggtttctattgagaattttatattattccatgtctgccacgtggctggttagttcacctctcctcagtttcatatgtcagacttattccatgtctggggtgagtctttctgtacctgactatctcctagagttccagtctctctattggaacttccactttgtacttcctgccttttgctaataggccatcagctttttactaacagatgactcttttacatagtgcacaaaagagtatccatgcattctatagtttctgttgatatccagctttaatacatggtggtcagataggattcaggggtttatttcaatttttttttatatctgttaagacttactttgtgtctgagtatatgatcaactttggagaaagctccataagttgctaagaagatggtgtattcttgtggttgggttaaaggctctgtaaatgtctcgcaggtctgtttggtttatggtataagttagcttcagcctctctctgtttagctggtctctggatgattggtccatggtgggagtcagtactgaggcctctcactatccctgcgtgaggtttagtatgtggtactagctgtagttgtgtttcttttacaaacttgagtgctcttgtttttagtaccagatgttaagaattccattgtcctcttggtgggttttccctttgctgagtgtgtagcatccttccctgtctcttctggttagtttggattgaagtctattttgtcggatattaaagtggctgcaccagcttcttagggccatttccttggaatatccttttccatcctttttccctgaggcaatgtctattctgattttaatattttaaaattcacctctaaaggacaaagtgctttcattcttaataactattaatcatcttagtttattgttagttttaaataaaactccctcagttttattaaaagatccagctaggttcaaatttaaattcattaaagctttttccagtttgtaagttcaaatcacagccttttgaatggtgtttttgtaaatcaccaaatattctttaaagaaactgtttttacaattttcatcctggagtttgccaagtgtatctcagtaatgtaattaaagatgttccctgtcctctgccttctctataaattgataatcggatttagaaccaaggttacatagctactagccacaggggctattttaaatttaaagttgaattaactacaattaaatcaaattaacttacttgttatggtacagtgcccacatttcaaatgaccaatagccacatgtgccaaatggctgccagagttagataatgtctctggtgtgtgttcatctttgtagaaagttctgtgtcatagttctgttaagtaaaggcttgctcaaattcactttccttgttggagttcaacttttgggagccagtgtttgcctcttttttactgacttttgtggctaatgcccaagtctgttatgtcactaaacgatgcagaatactgaccacagttttaaagtcacctctcactagcatgatccccccaagcttcactgctgcattaatttaattaggctgtgccattttgcaaaacttcggcaaatgaatgaaggactagaggaacttaaattgaaaatgagcctcagctatgtgaattctaaggaagggatgggattccagctgaaagaaaaatgctgcagtttgtagcctgacctgtcagccatctggcgatcccttttctctacttaaccatgccccagtgtgctttagagaaattaacacctcacccctcagttcaggactgccctgccattccattttgctgtgaaaagctggtcatgtgactttgacaactgtaaacagaatggtggggctggctttctgccgtcctgtgggcgagatggaactgctgcagctgcttcgttaggctgattaaggcagcagtgtgtggccagcaggattagagcggtttgggctcacacacaactcaagtgtagagttcagaagacaacttgcaggcgtcagttctttctccctgattggttgccagggatagaacttacttgcttacctaacagcaggccattggggagaatgtgctggcttgctgtcaactccagttaaagcactcggccctgccatacgctgtgggtgtgctggctgcctggacctttatctggagctccacctgagacctcgtccacactcagagaagaacttcttcagtgggtgacctagaagtgttttaacttttgccttgtagcagctcttgatctgtcacatatgcagattagtctaagagagggaccctgatgcacatttgggggtaatctttttacaaggtttcaatctatgatgctcggaatagtgctgttgcctctctagtccagtttctgttcccctggcctagcaaggtgtccctgctctgctgggtgttcatggaccaggaagtctccaggcagaaatcctgtgcagtagcagtgctcacctgatttgttcctcttgtctaggcaatctccaacttacatcacagactgacatctcgtccctgagttagttaacctttacccccagcttcttaaactgttcaacaacttactggcatgttgcagttcctgtcctgacctataggaggagctccgtgtgagcatcttagttttgtttattttcttctgggtacatcatggtcccttcacatcccacctttcaccaattctctgttttctctcttgcatttttttttcaaatagatctgtaattacatcatgtataggttcacatttcttatgcaattctcaatgtctgtggtttccaattgaattggctgatatgggaaactagtgaacacaccattctgtgttttgatagaaagtctctcattccgtcctgagtaggacacttgcattattttctcaagagagtgtcagccctttgggagccaggactttgcatacttcttacttaatgtcaagtactctttatttgagcagctagagactgaatatctctatttatgtcatgttctgtgctagtccccagggttcaaaatagctgaacccagctttatcccactgctgcccccagcttcttcctccagctccccactcccaagaataggacctagtggggtgtgtgtgtgtgtgtgtgtgtgtgcgtgtgcgtgtgcgtgcgcgcgtgtgcatgtaagtctaataactaactgctgtacatacacacatttttattccccaagaatgataaggaataagcaatatttgttctctcattttctattttttatataatatgaataatatttttcaagaactctgtgcctatgtataacaaattcagtccttgtttaagtgtacagaatttatctgtctgacctgttcctggagtttacagttttacttacccctagacttaccagggtttgcatacacatgtatgtatgtaacatggctatataaatatgaatgttgaaggctatatgtacatgattttaaagttaaaattagatcatagtctaatattttgagacttttttcaaaactttactacatctggctacttatttcagtttcttaaacactttattataaagctctatcaatttacacgtttgtacattgatagatttagacagttttttctttttaggattccattaagccctgtgatgggtttccttgtcttagggataatcgaggcacctgtgctcacctgcgcagcaggcgacagtgctggtgttgagggcatggccatctagtccagagcccgtggcacccacttctcttcctcagcctgtgcttgtttactgtcctgggaaaaggtttaacagaatgtatgtctaacactaaaatccagttttatatttgcccataaggatgtcagaagcacagctgtaatttgtagctgtgcatcatagaaggcctaagccagaccttgccttgctgctccagctttctgctcattcgggttctcggggcgtggagtgcaaaggtttgggcagtgggcgctgcctttgacaaactatggtagttgctttattgaatgtgtttctcattttgtttcttcttctttaaaataagtaagttgtatgtggtaaaacagtggatgcacacttgctagtggccctacgatttacttggctgggcaaaagaaatggagcatgtatggtgttgccccacagtgtaaaataagtgagccagatttgcattcactcctgctgtattgtttctgaggcaacatagcagttcttttcatgtgattaatagagctatagttgactaagtgtgcttttcttagtattatcttattcagtagtaattcttcactttatacagttggaaaaaactgaatggctgtttagtgctacatgccttgacacatctcatttattcaactatcatggtatgagcagctattgctctagggtctgagaaaaagtgttgtgtagctcgagaaagaaaaattgttagttataatgttgcagttttctccttattcaaccagaaagaactctgctttcactttctgattgtcgctcaggtagctcacccttcctctgcccttcctgactgttgtggttcagatctagacagtaagagaagaaagacaaaagttgaaaaccaacgggccgtctataccagaaagaaggggggatgtaccttagtggtagagcattggctctgcatcttcaagatcctacactggtctcccacacaagcaacagggtgctgaggggggtaatatttgatgggaaataattcatattaaaatatattctacaaaataaatacctgatggggttcctttggcattaatttgagggagcaggaaaggttggaagatacatggcaatgaaagaccaattaaagtggagctttagctagtagaactcctacaataaccagtggctgatgggacaggctctgaccaggatgccttgaagtaagtggtctttctgcgccacagttcactctgttcctgctgatcaatagttggctgtacttgttggtgttaatcagctctctatatttgtgagatcgctatttgcagtgtattgtaatttccaaaatgttttgtcttactcttctaacattattataaaaatttagtttctgataattgaaagtcattatgtgtagtcttcctttaagaagaatgtgaaaacattatgacttgtaccttggaaattagtttattcattatgtttaattttaggaaatggtgctcttgcagaactttctgaaaatgtgcatatttcaggagtgtcaactggtaagtcatcttttgtaatgtttaaatttcatgcatgacttatatggtaaatattgaaaaccttatggggtgatatttggctataaaaattactgctgcttttgcagcatgtaataaggaaggaaggaactggaacatggggaattctcataagatacagtgatattgcatgcctaagggttgattatactttcccaaacagactacgtaattatcttcatgtgtaagttaagccgaaagctcaagtaaaattagtgttttctctctatgcaaacttgggtaaagatgaaattaattttgaatgttgtccctaaaatttatggacttagaaatgaagtatcttgttagacactttagattagagcgatattccacgcaaagctgtttacttgagtgcacagtttgttaccagtagcaagccattagcatacttgtgtctgtgcagctcacaagtcagggagagaaccggggttttcatccatctgagccacagcttggttaccaaaggccatgagtgcacagctctgaatgacttccagtttgttgctgtattgctctgctaactgtagttatgagcatatcaaaaactatttatttttcatgtactgaaatagtttctgactactaataattcctaataattgctaataattatccatttgcctgtattattgacaagatttaggtggttaaaagttacacagcaatatttatcagcctactgattttttattataaattttgcaactcttttatctgtttcttttctcccataaagcaaacttagaagcttgctgcttgttttgtgtctctgactccgtattcaggaagttaatcaccatttctgggtttgtctgtgtgctcagcaacctcgcaaacatgcctggtctcccagaaatctacatagccttggttggccatttatttcacttcttcataggcttttagttgtgtattgactctacctcaactaaaaccaaagatctctatttcatcttatttattattgtatgacacagcccctgtgaagaggtgaaaagacactgtggagtcggttctcttccacagcgggcactagctcggaacccagggcttcacttgagtagcaaatggctcagtaaagctaagttctaaaagtgatcttgtgtgttcctgtgtcccattttttaacagataatgagaattgtgattacattcacaattcacaaaaggaaatagtattgtttacaaatactttaatctccataaacaaagactttttgtttcagaagtttttaaaaaccattatcttaggattcttttcaaatcctggttctttcagcctgccatagcagtttaagttaagcagatggtttaagtaacagcaatttcctcagagttctacggtaagctggaagtccaaagttgggtgctagcaagtttgattcctggtgcgtctgactgttcttctgagaatgcctagagggaaaggcaaagtctcttccttttatgtgcactcaatctaatagcatggtgagctccatgccactctgttctgatggaagtcatgaacatgcaaactcaaactcctttagtgtcagcaactgcgagccttggttgtggggaccctcaactctctgtattaggagcccttgttagtgttgtgtgacagacttcaggggagaagaacacacacacagtgtactcaccccagacagggagcccatgacagaccaaagcacagatgccaccaaagtccaccttggggagccattgagtcttattggttatgattgaagggtcacttacaggagcagaaatgactcaaagacagctgcatcaccaaaaagcccaccccagcctgggtgacagctcacaaaactgggaacctggagcacactgcacacagcctgcaggcagctgctcgggttgcagagtgtcctttccagatgcttcagtttttctaaacctcttccaaacacctgggctggtttgtgtctctttgaggcaactgagcagttctcagagtctttgcagattcattcattttggagttgtttgtttgtttgtttttctttttagttgtcttaagagtcgtctgagagtgaccctcagccatctttattacttactctttgtaaatctggtcagtttcaccaacttcctgaaggaattttgagttgtccactttctgtctaagaactcacctacagggtagaattgggggaaacctgatagacaacaaatagaggtaataactcctagtggcttcctggaactcctcctgtgactgggtctgaccactctcctgtagtctttttctctctgcattctgctcctggtagatccctaaactctttggctagtgcttctgcttgtgccagaggctagcagtcattggagttgtttctctgtaaaaccagttcaccctgccctcccttgataaagatcacagattataaagcctgtgttgaggtgtaggctgcacacaaggtgtccagtgtgcaggacagcggctccctgggatagtgagaggatgctgcttatattacatgactgttatgggtcagagaagtcctctgggaagacctggaggtcagaggttatgtgtaaggtcatcgtcatcggaagtagatataggtggggtcatctcagggtctgtcattggagctggcacagccaagtctccttaagcaaagccatggccatgccaactgcagggattctcgaggccataatcagtctcttcaggcattagtgcttgctctgaagtcaccacctgtcatcatctgttgggactgactttctttgaactgtggggaggtcatcaaaagagcataaagaaccatggaggaatagctgccatggctctggtgaaaatggcaggacagataatgaaatgttgccatcctgataaaccttcaggaacaaaagcagtattaccaataaccccactggaatcaggagctatagaggcagtgacactgttctcaggaggtctttgccaagcctagcctgagactgtcaccttgtttgaaccgtttcgaagcttagcacctagcctacccttagtgagagctggctccttctggctgactcattattggcttgaagccatcctcattttatctcagttacctcttctaagactgttcctgggacactggcatggttgttgggtaaatgcacttaccaccgacttctgtcccaagatcccctaaggtggaaggagggagccagccctgcatgtgcccatcccctgcactgcacatgatctcttagctccggtgctccttcccacccacaaaatgagtcagtgtgaggaaaaaaaacgttttaaatgattcggtcttcaaatattgggagcagggtttggcatatgagttttaagggaagaatgaattacagttcacaaaaaaaaaaaaaaaattgaaaaggtggagtcttgttttgttagcagttctgggtattaaacccagggagggccttgagcatgtcaagtgcatgtgtctctaatcgagctgaactacagctcttgctctattgctgttgctgttgctgttgctgttgctggtagatgagtcagttaagacacggtttctgctgcccacactttctttaaggagctgtggctaggggactcatcgtccagcccgcctcttacaagctgctgttacaggactgttgatgtgtggtacccactattctgttgtggtagtggtttttgagacaggatcttactgtgtagcccaagctgtcctacaaccaatcttcctgccttagtgagactgttactggaattattaccgcacagcatcatgtccaatagaagtttatatataatgtgtttgatcactacccgtattcacaatactaggaattaaagatgagaaattgccctaaaacttggaaattcaatttaaaataacaaaaaatgagtttattgcaagctgtgtctctaccatagttttattaaaatatctttttaaaacaaacatgtcaacagtatcatattttattataaagcttttatggatggatttaaagtaactggtttctcaacatttacttctgcattcattcttttgcaacataatattttatttgacacatgaagatatgttaattgatatataactaaaaatgtataggagtgttttaacaatctttttcagacaattgtaaatattctttattacaaaaatccagcgagtggtaatttctaaaagagtagctgcagttggaatctgagtttatgtgtgagctttttgtgagctgtgacactgcaggatggtcggctttggcctttgagtgtattttcattaacgggaagattttatagtatgtcagtcacttaatactggttgctgacttgagcagattaatatgcagtaaggaaagctacagaaatttggacatatccagtatcaaattgtagattttacatcaactgatcaggattagatgtctcccttttttctgttcgtctgagataggctactaggcggttttgtagtactgcctttgctcttaagtaaattctatatgagaagcatcagcagaaagtcacactgtaaaaggagcaaaacgtgttctctctattagcctttctctacttaggagtttcagataggtttagatgtacttactgtttactgtgtctgcctatcaaagcaccacacactaaacaacatatgtgttttcttgtgagcctagagacagaagcccaaaaccaagacgggggagggatagtttctccagtgttctctctggggctctgagatgccttcttactgtgtcctgccctagatctgttctaatggctcctgaagctacaccataatatcccacccgtgtgatatcatttaaacttagtgcctcatcaaagagtctccctgaagtcacagtgacactctgaagtactggtgttaggactttaataaatgagttttgaggacaatacaattcatccataacaatgtgtattttaattaagtggatttataaatcaataaaataccccatttcagaagacagtaaaatattattaatgtgaaatatttttttctgaaggttagccttataaaaatcgtccttctgtgaagaacagcatgtaagacctattcttgttacatactaaaagaataaatggattttttctcaaagacttttgccagtaaggaactattcatacatcgttttccttgtgtgaaatatttcagattggcatgttgggactggaatatttatgtagtctttattcattagacatcgttgattcaaaaatctgaaatccagaatgctccaattctaatattataacaaaaacctttcagaatttagagcattttggattttagatttggaggttagcaaagtacatgctgcgtaaggtttctgaaatccttgcatccaggagaattcggtccctttggtgctgatcacaagggcgcctgctccctgagctgatgacctgtgcagactctaccgtaagatagcctccctggaagaagaaggaccatcagctgtgctgccgcccagtctgcgctaagacttcaccttaagcctctgcccctttggtactgcagtctcctgctccagctgtctgcactgcagaacgtctactcaaaatgtttaattaggtcctaatttatcctgtaagtacagtcactttgaaaatgaaaaatatacatttctacaacaggaaaaactaggacccttcagatgcatgtccacccgatctgtaatgagtttgttttattctgcgtacattaaagcacagatacagacctggtgcccagatagtgggagtgtcttacttttctattgctttataaaataccctgataaaagaaaaatacgagagaaagtggttacttttagctcacagttaaaggtgcagcccatcgtggtagggaagtctaggcagcaggagcttgagacagtctggccaaggagggatgtgaactcagcctgctttctctgtcgcgtgcagtcaaaggtcctctgcccagggaatggtccctcccacaattaagatgactcttgtcacatcagttagtgtaatgtttatcgtccccgcagacatgtccagaggcccatctccaggtagatcataggttttgtcaagtcgcagttaacgcagaccctcacagtaggtaacagtctcaaggaacctactcagtgggagccatgagcacgtgcagatctccttatcaccgtagagctgtgatgtgcaggctgcacgtgtgcagggccttatcacagtaggtcctgaggtaagccattagcattgtaggccagaagatacgtttacaaaagacctagaaaagatgtttagtgaatagtaaatgacttgactttcgtgactttactgagtgagaatagtaggacttgcttagtccttttcactcacgccataatggagggagtcgttactttatgactcgtgtggctctggtacccaggcttgcaacactttgtttctgagtcttcatttctgttctgtttttcctcaaaaacttccaagagatatgtacttgtccttttgctcatttcataactacagattggcatgtcaaatattgaattataaagtcataatcgtgaatataaaaattactaaatatctttacttttttaattaagagcttttcatgaactagattttaaaatttctccttatatataagcaggagaaaagacaagagttttgtgaatctaataatgtgttgtaatcattataaaattatatagaacagtaccaagtaattttattattatagatgaacagaaaggctatctcagtttagttttaaatattaaatctaaatttttatttaagttaaattgttcatttaaatttttttactaaaaaaaatagctaaattgtagcttcttaactccactggaatggaacatgttttaggtcaggttaataacaagccatttgtacttgttaaacaaacatatttgatttttaaagagttgtttaatttaaactaagttttactctaacttatgagtttgaattaaatcaaacaaccaatatctgattattttttcttacttcttattgtttctaaatcaggttggtcttcagaaattttatttattcattgaattacagtttcattagacttcttcaaaaaatgaaaaagcaaaaagataaagaaaatcgcctattacacttagccttctagtatattgcaggtactaaacacattagtgattaactgagtcaccagtagagcagcagatgtgttgcgttaagaaaagaagtaaaagcacttaacccttggggccatctaaccaagaacaaatccagatctggattttctacctccccctctctgcctctgcctgctgtatgagtctgagtctgtgcctgcttgggagtctgaagtctgaaggctatcttgggaatctgttcaggtgcctgtccttgtgtgtccatcttgtgtgtcagtctgtccctaaccaaggacttcccacagggaaagaacgaggaatccattacagaagtctttggtggagttttatacaggggattaagccacttacttcagctcacccagatagcaaagtcgttgtttatcaactgtgtccagcacgtatggcggagacgcactcagatcactttgaacctttgtggctgctgctcttagcaaatgatacaaatacatggccagggtatggaagactccataatttaagactgcatctattcatcagctctaaaaaacggattaccttggaatccagggcaagcaaggttggttgttacactgtcctcttaaaagcaagttaaacaaactggctgaatacacagtaggctagcactcttgtctctccagtgacctccagatgtagtgatagctctggctgtgaagttcagcagaagttccagtctatgagaacataggagatatttttatcacagtatatataatattttaatttatttcatttgtgccttttctgtgcataccttaaaattacatttttcacttgtattatgactaatcttatctcctgccctttctgtttaaatttttatattttatatttttatttgtgttcatgttcattactttaatgcttgcataaaattcccatcctgtgggatttatatttaatgtttggagctgtacccagtgatttccctctagtgtggatcatgctgcaagatatgttaataagtaactaacatttttatttctaagactgtattcatagtacaaaatcctaatagaagtattgtatcaaaagaggttataccaattgacacaattatttgtagcacatatgagtatttacattagatatgatcatcatttcttaatatttttccttgtggtaattctgtcaggacccaaccttttacttttctgactgtttttttttaatgtaaataaataagaagttaattgcttttttatttgtgttctagaaatgtaatattgtaaacaaaataagattgacttctgtctataattagacaaaaatatacttattattatgattgttagaagaaatttgggggcttaatcctttctcacctggaaagttttgtttgttttacattttattttaatgttaggactggcatgtcatactcattcaacaatgagacagctctgtgttcctcccttttaatatcaatagttgaatgcgctaaatgaggttagtttgtctggaatctattctacatttgatgtggaatcttttatcaggcagagtgagcatagagagctaagaaaaaaatattgccgtcaaaattctttacttcttgctaatattaattaacttagcaaagtgtggacctgagacggttgtcaagcgttattttctacttgtcagaattgactctttcagaatggccttcctttgtcacctttctgtgtttgcattttatagctgcctattctgatacttagagacccagcaccctgctcatccccagagccatttacaactgagggttcagttgtagccttaagaaaggcaggtgggggacttccttacaggggtgggggtgggggggcttactgctgtctgaattgcagttgctttacttatgcaagagttaacaatttgtgatgtatatagcattgtggtgaaatggtttgtttttagctattgctttaattttaaacactataatgtagtttttacagtttcactgatgaaatattaattttagaattcttaagaacttgtaagtaaggaatctgaaagaaaaacttaaatggcaattatttaatagtgctatgtggataattttaacatagaaagttatatgaatgaggagtggtcttttgtacctttctgggggatttcaatgatattttagtttttcaatcaaataccttgatcttttgctgaagggaccaaaaagaatttcactttttcattgaccagtgcttttatctatgtgtcaaatgaagaaagacataagaaggtgctatgttctagttgataatgagcccactaggctttttaagactagagtatataaaatagaacttagagtgaacccaagaaactccttcagacaaagaaagggtgtggggatgcaaggtactacattcttaaggaaagtaactcacatcaatagaggatactgtgaattgcctacctctccagagcctggccatggaatgttccagatgctgtattagagtgcctctgtgagcttgagggaggtagtggagataccataacttttatattatatgctgtgtaacttaatcttgttaatattttactatacaaaaatgtgcttattaatctgttatgtaatcatgttttatatggtatcaaatatctattaaatggctgttttaataagattacaatgtattatcacttggaacagtgaataaactcagcattggaacagttggagtgagcacctagaatacagtcaaagcgtgctgtatgttatgagagtatcatggtagatgatgagagtacagagcatccagatgagcagtccgctgctctgagtgggcaagacccccctccctgaaggtatcaaacaaatgtatacaaatgtggaatcttatctctgacactttgagaataattcttcaaagtgtgattgcatattaattatctgtaattttgcaaaatcttctgttgtacaaagccactcactttagtttggacatttctataaggtccacatgtgaaagcttaggccccaagataacacttggaggcggtggacatttcagaggtgaagaccgtgggtagtcttgtgatcagcttgcccccagtgctgattgcaggaccctggtcccttctttctggctttctgacttagcataaggcatcacaggcaccaactctgacgagccatctcaccaaagaccaacctcctgaagctatgagcccaaaggacctcttttttaatttgattatctttggtactctgttatgcttgcaagaaactagctgcaggtgggcaaactggacttttgatatcagtttgctaatgtagctcagttataaataagggagttttttgatcttcaatgtccgtaataaaggagatgataatttttattacccccacttcagcacacaaggacataatgacttagatatataatatacattgtctcaatagctgatagagatggcttggatatcatggactctgagaccagcttgtttccagcttgttgttatggctcctgcctagtctcttctacttcaatgcaagcgcttcctgcaagagtcaactcaagcttcagaaattaatagttttccccatccaggaggtagaaataatcccttgctcagcatttaattctctagtgtataaattagaaaatgtaggcaccataacaataatttttatgcccttgcagggaaaaaagaatgccctcatgacttaaaaaaaaatgtataaaaggttgaatcctcccaattcatcttatcttatgctttgccagcgatttcggaattgctcatcacgcttagacccttcccagggaacggttagtttcttacagtgtaattacactcagcgtcagtgccttccgcagatcacagcttactacagtccgagttcctcttcagtatggtgtcgcttctgactttattgggtgttttattttaccaccatttaacatcattttctcattatttgttatgaacattgcggtcttcaagaaaccatggaattaccagctttgattaaaattaatgtgcaagcaaaataatttggttcttaaggaatgctactgagagtaatggggacaattctgttactatatccacccttacgtatctgtgctaatgcaggcgaatatgcatgtgaattatactcttctgaatcggcagtgggccagcaggtattggattttcatataaattatttaacaagctggtctgtttttcaacatttcctgcctttgacttccatggctacagtgtttcccgtatgtttaatgatacacccgcttgcacatgcctgtgcttagaagccaaaagttaccttgggtaggccatccttagtgggagtcacccactttgtttttggggatttttggtttgttttttgaattttattaatttattttttgaaaagtgtgtgtgaattcatccatgtgtgcagtgtattttaatctgccccctattgtctgccttcctctcttcccagaacccactgtttcccctttcaacttcaagccttctttaaattacccacggagcgtggcactctataggaagctacacccttaaagaaatctgcccttccctgcagcgtcaccagtgaggccagaggtctcctgggcctctcctgacctatgctggaatgtctgctggcctgaccttgtgcagctcttctgctggcagcagccataactattaggattcatgagtgtagcagctctgtcctgtccagaagacactgtttcactgcaacccacacagcctctggctcctgcaggctccctgaccctctccgtgatgttccttgaaccttggtggactgtgatgcaggtgtgaccctaagcaccaagctcaccaccataattatcttgagtttttgagacaggatctctgattactctggagtctgtagggaagcctagactgaattgtcagccagcgaaccccaggggtgcacatgtctccgcctcccccacagtgggatggcagagaccatacaccacttcggttttcacatagacactggtacttctgcttcaaagcaagtactttaccaactgggctgtcttcttagccccagcaatggctcttccccccgcgccccccactccctcaaaaaaatacatctcttcaattacacttatactagcactttcttacatgttttcttttaagctgatctctttgcttctgtaatttttcttcccacacgtggaggtaagtacatgatattattgagcaggggggaatttacaaaccctcctgaattatgtaagtatagaaaagggtactacaacagactgagaacaaaggcagtctttctttaatatgtatgtaagtataggtatataaaaagcgggttctgagccagcatgctcagaaggcagtgactcggtgtcattgacggtagccaggagaaactcgcagatgggaaaggacagggctcaggttatcttgtagagattatgttaagtatggcattttaaaagttatcttaagtatatatgtggtgtaatttatccttgtactcattacatagttcttataataacttgcgtttcttagattcaactgatagttgtgcatccttccacaggtcttatttctgtggaatatcagggttttttttttttcatgcccttcatgtttgtcttgtgaaattcagtagtcagtgagtgtagttactaacttgtatctaacttctgtgatttgtacaaccaaaaattgcgcacaatttatgttcctcttggtctcagccacttgttgctataaaatgtccacccttgtcagttctcaaaagaaacctgggttttcatcctttgaacaggaaattgtacattttcttttacaagtagtttgggtcaaatcataaatttcattgctaactcctttttctaagctttaaaacccatgaagtctgaaattgcaggatttatttgacatgactttgacatgatctcgtctctcccgtcctcatcttaatagaggtcatccgaagcctccagttttaaatgactgctgtaaaaatgactgtttagagagaaaagcctggtatattaatctacttttacaaccacaattctctgcttttactgtaagattattgaaatatcaatagaaacttgaagctttgtattttattagttttgcttaatttttaagtcttacaaatgacaactattttaaactagcaaactaaataaaaattcttactaagaaatccatcaaaagacctcaaccccttcattcttgagataattttctcctgaggaacaggagaacagtattgagttaagccctctgagtgacttagcctccttagggttggaacaatgtcattgttttctctaagtccctgcaaatgtctgtgagtgagtaatgggctttgaggtgctctcagctcattaggggcatgcgcctgcaccttagaagctgccatcgttcactcttgttgctgattttctccttgtttaattgactaaggtttgccaagatgggtcttgctctgtagcctaagtaggcttcaatgtcccagtcttcttgccttcatctcccaagtgcagatgccatcaaccacagcaagttgctgtcttttgaattaacaatttgattgttgtggttctattcctggagttaatggagaatttataaaaccttagatgtgtgtcataattcatgcgtgagtttttgtttatgtctaaaggtatccaacaaagttaattaagtagatttggtggggtatttggggtggtggtggtggtgatgtttgtgttaaaaaaaataaacaatttatgatgctaattatgaaatttattaagcaaaatgaacaaagaatctagcaattttgacatgccataggtacatgcatgggtgcatgtgtctatgtatatatgccatgtgtgcatgtatacacgcaagcgtgtgtgtgtgtgtgtgtgtgtgtgtgtgtgttttcttggaaaccttgtgcttacactaaaacaacaagacttttcagaaaagtgatgctgatatatatctcttatagctgttgaactttctaagtgtagaaaaagaatactagtcacaatacttatgtggtcagatatccatagacattttgtatttacagttggtttgtattgcacggccacataggcctgggttcatgcttgtttcttcaaggcattcatttccaacagggaccaacataaccaaaacaaaaggaaaccaattgattgcagacaaatccttccctaggaaggtgctttgttttaacaaggtgtgtggtagcttcccaaatctgtcagcacttgcagcttcccaagagcatccaagaaacaggcagctctttagccctaagtagccactccttgtaatgaaggaaggttttcctgggcttttttcccccttaactcctaccttaagtcattagcatgctaagaaacttttcatgcaattttatattatactaacaaaattcctccctttgccaattgcatgtaaattaactcttgtaaagaattaactggaccttataattatgtgtaatcaatagagaaggcctggattgaatgaatgtatgtaaaagaaggtcaaaattgaagtactgtaaattaggatttctgttaaagtctagaaaggtaaggtttaaagaggctgaagatgcaagtcttgtgttctaaaacaaaacgttctaaatgtgagagctggagagatggctttgctcttccagaagacctgggttcagttcccatcacccacttggcagctcacaactgtaactccagttctggatctgactgcctcacctagacatacaggcaggtaaaacacaagtgcacatgaaattaacgcaaacaaaactgcttcttttaaaaggtttggggagcatgtggcctacccccatcctcaccctggtttcatccagcaactcactctgtgtgactctttttccctctggagcataggttagctttcttctgcttcccttcctgctgacctaagcctggtcccctgaagcaagccaggcttaccagttagcagtctgatctggtgtatgtgatattatttactgaccatacctcagtcaatcaacgcagataagttctttatcaaagtaattgtatttataccttcgataccctttgcttggtcttcaccatttgaatacccacttaaaagcaagaaaaaacgcggcttagatttagtcacattaaacagtaaactatttcacattacagttgcagttaagcatcagagctgaagtgttggggtgagatgggatggtgccatgtatagagcactaatatcatgaaagaaatgagggttgaaaggcactaattcaaaggttgggcctcggtaactttcatagtgaaagcaaacttggtttccagacgaagcttccagttttcctcattaccaaatctagtttgtgaatttctgagacaccctgtgatattcttgacataaatttccttttattgaccaaatgatgctggcaccagtgaagatggaatgtagaacagagagaagggtttgggaagcacagcgttctggccatgttagtccagtgagcatctgaccatgcagactctctggctagagagtttaattaaacacataacctgtaggctgtagttgaggttgcacatgtgtgaagtgtgctgacagtggagcagaggctcgggacacgccatggacacacccaaccagagagccaggggagggcactaatccaaggaagcctgcaaggcagatggaggagagccacagataggtggcggaccccaacaagaggcaaaaaaggttaatgccaggtgctctgaaaagataagtatctcaaaaactgggggcccctggatttggcagtgagggtgtgtgtgtgtgtgtgtgtgtgtgtgtgtgtgtgtgtgtgtagtttctatggctaaggttagaattgagtgattttagtggatcaaatgaatgcaaagtatggaaagaaagaaatatcttgcttatcctagcgagatttcagaaatgtaccacagacaaaagtgataagggaccagaaagctgaagtagaagttggaggtagtcaagcagtcactacttgtctaacatgaagaaattacaactaggtaagtttaagtagtttatactgcaggaaaggcagtaatggcagatggaagaaagagcctgtgggccttcccatcccagttgatcagcatagtacaggcaaactcttacccaaaacagaaaaaggacagtttaagtttgtttggggaatttaatgcatttttttcctaggtatatgagattatgttatgattgtgctataaacccaatacattatacttgggtgtattgactaaaacgacatagatcaccataaacaatgataaataatattttaggagattgttatgttaaccctgatttaaaatttatacagtgatatatgtacttgtgtgaaatcatattaacacacagttttaatgagtttatagatcagttaaggcctcttttaaatccactggatcaaaatgccaaattctgccattctgtgaatgtgcaaaacaaagtcggagtatgaatctaaggacaatcctgaatactgtagttttgttttgtatttactaaggggaatgatgtatgtcactatgaatacaagtgaaattttaagtgtattaagccttaaaccaatctatggcagaatgtctcagccctgtgcacttgtatacatgtgttcatgtgtatttgtgtgtacttgctcatgttcatgtgtgctcatgcatgtatatgtgcattcatgtgtcctgtgtatcacacaaaagttttatcttttttttttttatgtgagcaccacctattggtttcacttggatttttttcttaaaacctaatttaaaaaactagtaatacaataataaactttctagttttcccctagagttagtctagtattcatttaaaaggtggaggtttcctgctgtgtcagactctcctgcatccagggtcctagttgctttggtaaaaagtaacaagaaggtctttagaatattgtctcctgagattaccatggctgcattagtgaacggaagcaaaattgtacttcattgtccctgagcttgtataatggaattacacttgagaaacggattcgtttttgaaccatcattcatcacaatcagtcactttcctcgcaaaggaggagttgactctgtggtgtagctgagtcagggatgacctcagatttctgatcttccttctctgcctctgagggctgggactggagagggttccaccatgcccagctcaagacgtttactagcaatgaaacttaaggacaacaataaatacttaaatgcatagcgatagccagacagacagccataatcaataagtgattaagattgggcagtaaaatatggtatgtgtgtcctgtattctcagccatggctctccatggtctaacagtggttcacatgtgagccctttggcagtacatcctgattccttcttaggcttgctctctgagtaggacatattttaaaacatcaatagtggattttctacagtcacttgttctgtagatccaaaaattgactggagacaatttggcttgctttattttgaacaccatcaaagacatttcttaaactatgcagtttattacctgttgctcttagcctaaactgagtaacatcaacctctgtttaaaaggaagagtttgcctgttgtaaattgcaataaggatatttggctgccttcaagtctggtcatcgaattttttaaacttagtgtcagagttcaggcaatatgtgcggctgagtacactgctcattctaactcattttctccttctgcagtgctttttaaagtacagatactaattagttaattaattgggacattgatgagcacatcattttgttttgtttttactttgatatacaacttttttcatttttctgaaaattgtctcaagatttccagtaattctttctgtactcttagcagctgttctcttcactactaatttgcagcttcttctagtcagctattactttagaagtcagccaacatagctcattaagattgtatgaaatgatagtttacagggtttacgttctactaaaacctttagctagctttattttttcttgttcctcatctgttttctttcctgctttctttcttttgtttctttctctttttctttcccgtctggccaagcgtttttatttgtattgagagagaacacattgtcatgtcatcagcagggttctagataaatgaagacagggtcagcataaatgttttctttggtgatgttcacatatttaatgactgtggtattttaagtatcacttcagaaatttagtttttaatagtttaggatctttcaagagccctgtcttagttattttttttttcttactgtgataaaactccatgacccaggcaacttatagaagaaggggtgcttgtgatttcagggggactcagaggctcttccagaggctgtggccaggaaccagtgtgtatggtggctgagctacctgaaagggctcacaaacaggaaatgtgaactaggaattgcgagtagcttttgaaacctcaaagtccctctcacagtgacatacttctttcagcaaggccacacctcctaaacctacccaaatattgccacaaaccagggaccaggtattggaacttgtgagcctgtgggggcttttcattcagatcacaaccctgtgtttatgcctgatgctcttctagagtaatgcagcaatggtgttttaatatcttactgtctttatccagtctcctttgtatcaaaaactatagctcagtatcatatggttatttaaagctcactgaaaataacttgatgatgctaaagatctaagcacatttattgaataaatattgaactttaggtagctcacaacaaaataaattttaaaaatcaatttgaaaaatgtggattggggaattgactgatttttatgcttagactttaaagctctgatgcctgcatgatctcactggaaaagctccttgtttgctaggaatatccaaataaggagaaggttcctttagagaagaaaataaaatgccaccgtagacaagagaggctttctgagcctgctgaaccaggtcttactgcatgtgatttgatgtctgaagtgatttggattttcaaagaaatgttttaatttaagatgtcatgactagctaaggttgttgtggctgtcttccagcttgtggggagagtccagaacaaattcgagcaccgagtggaataatcacgagtccaggctggccttcagactatcctgcccaagtcaactgcagctggctcataagggcaaacccaggggagatcattactataaggtaaccctgatacctttcatatagttattcttttatttagaaatatgaatacaatttctataggtacagcaatatgcaatgttttacagaccaaaaataagctatggctatcagtgccatttaaaaagtgagtagtgatctagtcagtgttctttcagcacattatcaggacgtcactacaggcagacattgcaactacttcttaacaaaagtataattttctaagtagcttatgagaatccagagaagtctttagcaatgtgtagacaaacaaaactcactacgcaactcagagacccattccataaccttagtcgtattagttaagggagttaaactgggattgcagagctgtgtgctcataaagctttaaccacgctattaaggatatcttgctatgttttgtctttctttgctgtgtgtttgcatgtgcagggtgttcaccatgtctgcacatggaggctggaggctgatgtttgcatgtgcagggtgttcaccatgtcttcacgtgctgacgtgcagtcctctcttcctctgcgcctttccttttgagaagggtctcttactgaacctggaggtgtcttttagctggactggtggccagtgagctctggctatgagcctgtaccccctgacacctctaagcactgggcttacaaacatgtaccaccatgccacatggattcttgacatccaagtcagggccttgtgtgtgcgtagcaagcacctgtccacagagccttctcctctgccttctttttataatttagaagcaaaataacattgtttaagaatataaagtgaaggctggggagactattcagtcacaaaagtgtcacatgaaaacctgagtttgaacagccaaacctcccatttgacaaattccagttcagctagaaactctcagaaaacattggttagtggaatctgaagaacaagaatcagctgactttacctctggccacatgaacatgtcttttcccacaggaacatgtgcatacatacacatgcactcttaacccccatgagccacttctacagcccccatatatggcatttctatgaaaactcaaccatcagcttcggattctaatataaatgttgtatgaaaaggttaaattgcaaagtgtataactttatagagaaaaatactgtgagagtaagattaaaaagtggttatttagtaacctgctgatgatttcttacagtcctatgtcaagactgttaggggaaataatgggcctaatcaaaggagtgcagtgggcatcgagaccagagcaggaggcactcactccctttgagtgttagggatgggatcgaagctttagacttacaaggtggtctgggggacattgcctcaaaccccttttacatttttacaataaagtatgtaacttagtttactttttgtgtatttccacgtaacgagacaaccagtcccttgagaaatagccatcttccttcccaggcctcctctgtggaagctgtaagccacagctgtaaggtattttcccttagttcctggaacttaagaagtgacaaatgtgagtgtctcccctgattgacagcatgtatgtctgcagaaacaccacccaagctggagtctgactgtttggctgctttctgtaatttgtaatatgactaagcatgaatatactaacagaataatatttttaccaaatggggctgttactataaagctagaattaataggaatttgtatctgaacctaaaagttagaattgtagctcagcagctcagagtactccctggtcttacagaagagcagagctctgttgccagaccccacgtccctggagactcccagctgtctgtgtggtctgtcctaggggctctgacaccatcctagcctctagggcactgtacacatgtggtttatttaaatatacccagacaacacagatacacacacacatacacactctacatatgccatatgcataatgtaaaaaataaagctttttagaaattgtagcttcccagcgagctcacgtaaaacttggagattcttgcagcacagaatgctctggaacactgccgtgagaacctcattgtgtgttgcatcgtggagacttcacaaagcgaaatacactgaaaacatagggtactgatgaaatgcagaacagagccggaagtgagccccacacttacgggggtttttccatacttgggaaggagttaatgaatttagatttacacagataaatgatgactttagtaataaagtctttattgtgacaatagccattttttttagaaaaaataacaatggatgtacatagagacaagcatttcatgggcggttattaaaatatggttttaagttattcaaagagtcctatgcatgatcatatataacccatccagatgttcaaatgagctcatgataggaaactttatattgatttactttttaataagtaaaacaaaaagcatatcacttccaggtagatgatttaaaatatctatttaagtaaggataaaatgagcattcacctttaaattcaagataaaattaaaatcctcaataagatgaaatatacaggaatatggtatacagtatgctagtttttgtttgtttaataatttaaggaccagacctggatgtgtagccagtgacctggatcatcctgcctctttaagtggtctaatttgaactagggcggaagaccctagaatgcacaagtgagagctcccagcataccctttagagctggagacataaaccggttcacccttttccctcagccatacacacagaatatggagtcagagccaaggaccagggtctggctgtttgtttaagaaagcatgtgaagctgataagtggatattagcccagaaacttagaatacccaagatataaggtacaatttgcaaaacacatgaaactcaagaagaacgaagaccaaagtgtggacactgtgccccttcttagaattgggaacaaaacacccatggaaggagttacagagacaaagtttggagctgtgacgaaaggatggaccatctagagactgccatatccagggatccatcccataatcagcctccaaacgctgacaccattgcatacactagcaagattttgctgaaaggaccctggtatagctgtctcttgtgagactatgctggggcctagcaaacacagaagtggatgctcacagtcagctattggatggatcacagtgcccccaatggaggagctagagaaagtacccaaggagctaaaggaatctgcaaccctataggtggaacaacattatgaactaaccagtaccccggagctcttgactctagctgcatatgtatcaaaagatggcctagtcggccatcactgggaagagaggcccattggacttgcaaactttatatgccccagtacaggggaacgccagggccaaaaagtgggagtggatgggtaggggagtgggtgggaagatatgggggacttttgggatagcattggaaatgtaaatgaggaaaatacctaataaaaaatatttttaaaaaaagatagaactaatgacatcaacctgtgtgtatgacatcaggggtttcttcatagccttttttgtccactcagtacttggttgtctagtaagacatatgaactaattaccaaaatgtttcttaattaataaaaacaaatagccttacaagatataattgcatttacatgtagctagtggatatatttgaatacttatagtaatatatacctattggcatgttgactaagacaaatcacagttctaataacttttccatgtaagtagtatttttagactgttaaaatcataaatgtactatgaaaatctgactcctcacgtgtaagagagagatgcctgtgtgtagagatctctgaaagcaccgtccgtaataacggaaggccagagacaaacagcctgagttagagttgctcagagcattgaacgagaaaacagctcgacgtaatccttccagttaacttccttagaggcagagagagaaagtcagattttcatttgttagcgagccatattcagatgttgaaagcaaaattgaatttctcatttctacaagcagtgactgctttcatgttcttgtttgattttctgtcatttacttgtgtccgtattttaagaactacatgataatgctcaactattaagtgatttatatgaaagagtattctcaaactcagggacttctcaaacaaatgttactctttttgattgccccccttaacttctcacccccattgttctgatttgctgctctaaggaggtaggtgatggagtctaatggaagagagagaggagcctctctagcacattccttcatgctcgagtttctggctcaaacatgaagaaatgtaggacgattgattgggattggaaatatattttcttaaatatgtaaacaaaaggaatatgtgctgccagctggtgttcagcttgttttggaatctggtcttacccttatgaagagaaagaccattctggaagcgtagggaggtgcatgcatgaggaatgtagaagcaggtatgtgttgccggggtgcaatcgctgctagggcagaagcagggacttgtggagttttgtcttcagttacatggcatctttatggacgttcttgtcaattgtttttaaagtcccttcctcctctctcttgttatagttttcaggattttgatatccaggggtccagaagatgcactttggactggctgacaatagaaacatacaagaatattgaaagttaccgagcgtgtgggtccacaattccgccaccatatatctcttcccaagaccacgtttggatccggttccactcagatgacagcgtgtccaggaaaggcttcaggctggcgtatttttcaggtgtgtttttaaaaaggaaacgctgcaccatgttttgtggtgttacctactcagttactttgtagttaattttctgagcagtatccgattaatcatgagttgaccctcaggcagctgagatgaagattagaagcttgagtcagatgccttccaatttgagattccagtttgatgttttgtataaccataataaaattattaatttcatgaactaaagtcttttttaaaaaaacatcttattatttgccttgaaagtacacttttctccaagcctctttcaagcatttgtccatatctcaaacatgacatcagagcataggttttggtgtatgaattcctgttttcattacaccttaaacaaaagactgaacccaccccacagcgtagtgtatagtctcagacttttacgtttttgcttttcttaaaccatttccaaacatgacaaagtcatgcacatgggggagtctttgatcatgattacatgaactgtaagcaatttaaagttaaaatgacaatgtatccaaagcagacctaaattgtaaacacagcatagtgaacacagtaagttactgccgtgtttgcgtacagagacaagaaagatacttaaaaagcagttatttgagtgcttttcttctgcaaacctctctcactatgttctaattatgttgtaaagagttacgttctttagaaagtgtgttctttggctcatgtgtcttaaatcatttcactatatgttctacagtgaaatagctttctaccaaatagaattgacccttctatattaggataaagagcaaggaactctgtgggaaaggaacatttaatagatgggattgttgatatgtggtaccagtgctagtctcccagtagaactaaacatactcttaacactgacacggttttgttttgtttttttcttttttttttttggctttttggctttttggctttttggcttttcgagacagggtttctctgtatagccctggctgtcctggaactcattttgtagaccaggctggcctccaactcagaaatccgcctgcttctgcctcccaaaagctaggattaagggcgtgtgccaccaccgcccggctacagacacggtttctaacagccgtaccgcaggagctcagtcatcatcattgtaaaggtgctcctgtctgttcaagtctgggtgggctttacttgtgttcttctttccttgccacactctgcagggaaatctgagcagccagactgtgcctgtgatcagttccgctgtggaaatggaaagtgtattccagaagcctggaagtgcaacagcatggacgagtgtggagacagttctgacgaggaggtctgtgccagcgatgctcaccccccaaccacgactgctttccaaccctgtgcctacaaccagttccagtgtctgtcccgcttcaccaaagtttacacgtgtctccctgagtccttaaagtgtgatgggaacattgactgcctggacctaggagacgagatagactgtgacatgccgacatgcggacaatggttaaaatacttctatggcaccttcaattctcccaactaccccgacttttatcctcctggaagtaactgcacctggctgatagacactggtgatcatcggaaagtcatcttacggttcactgactttaaacttgatggtaccgggtatggtgattatgtcaaaatatatgacggactggaggagaatcctcgcaagctcttgcgggtgctaactgctttcgattctcacgctcctctgacggtcgtttcttcctccggacagataagagtacatttctgtgctgataaagtgaatgctgcaagagggttcaacgctacttaccaagtcgatggcttctgtttgccatgggaaataccctgtgggggcaactgggggtgctacacagagcagcagcgctgtgacgggtactggcattgcccaaacggaagggatgaaatcaattgtaccatgtgccaaaaggaagaatttccatgttctcgaaatggtgtctgctaccctcgttctgatcgctgcaactaccaaaaccattgtccgaacggctctgatgaaaaaaactgcttcttttgccagccagggaatttccactgtaagaacaaccgctgtgtgtttgaaagctgggtgtgtgattcccaggatgactgcggtgacggcagtgacgaggagaactgcccagtcattgtgcctaccagagtcataacagcagcagtcatcgggagcctcatctgtggcctgctgctcgtcattgcattggggtgcacttgcaagctttattctctgagaatgtttgaacggaggtcagtatcaagacagactttactgcaataaacgcgaggcccagggactgggtatggggcagtttagttggtcaagtgcttgccacacaagcttgagtacccacacacagttggacgtgctggtggacacatgttagttccagcagagatgttagggtccctgggctttgccagccagccagtctaacctgattagaaatctccaggtctcagtgaaaggtggatggttactgaagattgacacccaaggtcagatgcacacaggaaagcacactcgtgcacatatgcacacacaaaaacagggaagatttcaaagtgtgccccaaatgtctgccgttattcattttgatgtggcttagagatatataaatttaggatacataaaatttgaatgaaaaacccaatggtcaaagataaacatagtacaaagtatgatttagctttatcaggtgagaaaagtcaatgttatatttactaacttactgtaagctgttattctcagttacagttttatcttgttttcataaatattcagtaatgccatatatctgagagtccaatgtttataccattctacaagtgagaaggaaatgaatgagccagtttcacaagcaggctcatgatgaggagagacttgttgcgtgggtaagctgagcacagtgagtgatctgaagtctccaagacaaagtagcatagatgtcctcatgataggggcatgtgacagtccttattccaggagctgccatttgaaaatgtgagtagggtgtagagaggagatcctggaggggtcttctctggggagtatatagaagaatgtccagcattgctccaagaatacatacataattcatttggtctggagccttggaaacacatgagggactggtagcacatgacagtggagctcggcctggttatgtgcagttcagtgagagccgtattctcaattgaataacaagttaggcaggagaatggacttcagggagagcagcttccagcgtggtttaagataaattgagagatgttaatggcaggggcatctccctagagggcattgtggggacagctgccttcagtcctaacagctacaaatgatcaattagcaaagaccatgctgaacagctagagcacagatggtgcacagatgcatggggccacaagagccattgtgcgtcttttctctgagcaaatagaaatggctaggaaactttaccaacggagagttgggtctccgattacatcacttcagtccacctgtgttggaattgatggacaaagtgtctgctgagacctgtcaccaattatctcctagagtgtaggggcttggggttttaaagtctgttattttatcatgtacagatatttcctttggcagacatttctgtctattaaaacatagtaatttaggctcttactagcataagcacctctggacaaccatcacatcagccttacattcccagagtagaagtggttgggtggcgttagttagttgaaacattcaagtgcttcagttctgatggcagagcattgctgcttgccttcctttgaaccttttcttctctttactccaagatcatttgagacccagttgtcacgcgtggaagcagaacttctccgaagagaggctcctccctcatatggacagttgatcgctcagggactaatcccacccgtagaagattttcctgtctgttcacctaatcaggtataatgagaattctaatctgtttcatcctcttttaaagtctataagtagtaaagcagggattcttaactttaggagttttcacaatcatgcaaatattaaatatatggacaactgaatttataaattgtattacattttcacagaatctatacaattctgatttttataattataaaactgtcattctgagacattttccttttggggataagtgagcaggtgaactgaaatttaaaacctttggccaattttctgattgaacatttagagatttaagaatgaatggtaaaattaatgtactaacacattacttacggcatagcaacccattttaagtgaaagtaattgaagaggagtgaacatttgcccctaatttaagggagaacttgaagctgggttttagtgtttaagaatttggtccgttttcttttggttgtaactcatactctttggttcttcaaagttctcaggaagttttaaaaacatttcaagctataaaaatgtaccacagcttattttagtcataagcatttgtgtgcatttaaattttaaatatattcacaaacatttataaaaatgactcagaattagaactaggaaaaattagttttttagagccttaactcttttaaattgaacatcctttcacttctgatacatgtcaccttagctggatattctttcaaatcctcagtgacaatttgtagatgtaatttttaattttttcaggtgtagtttctaattcagaatttatactggtcaaattgttagatataaaaaatagaaaaaactcgattatagtttctgtcattggcactgccaccatcgatttctttgaagataggtgacagaccgtggttacctccattggctaccatcacctccttgccactgtgctctggaaagctagtaggagcacaaatgatgtgactgctcactgctaggaccatttgcaagctggcttctccagctccctctggtttgccagctcactaaaagaatctgaagggctcacttggagctgtttgcccatggccggaccctgttgctatgagaggatatgaattaaaaaccactgagggaagaggctcatggggcagagttcagacagccccatgcagaacactgctgtgggacaacattccatagctgttacccactaaggatgctcacccaagtccccatccagactcacatatacagttgtgatcagttggacatggctagtgtacttctgtagccctgctgatatggctagtgtacgtctgtctgtagccctgctgaaactgtccccttaccatgaatcaccagagccccaccctaggtcacaggattgtagctgcctgccagtctcccaatggagacagcttttctgtcagtcatggcactccaagtgtatagagattctgtcccaaaagccaaggtaactttgaagtctattccatactgcttcattctctagagccacaaagtattaagaattccatttaaacagcattttaaataacataagttgttgaactttgtttaatgaggccaaattctcacatttgaaatttctggtaacaaattatcaactttccataagtttttaaaagaaaataattttgtaatttgttcctagtacaaactagaaatactttcttgtcagttattactacttcacaagtgaaacaatagacagttatccaccaaactactgtgacatctccctacagaatctaatgttaaatttgcaacttttcagttaacaggcttttaactaagcagagattgcctgctgcttgtgactgacagtaatggtaacgtcggtagaaagtgtgcgaggtgagggtctgtcagaagctcgggctcacgtgacagtggtttgaatactgagcactaggagtggtcaatggagatgttcattctaaatttgaactactattagtttttaattttgtatttagattcttcttaattggcaaaagaaaaagacctttcacatttgtactgaaagtccatgtatgctgatagccagatttactggtgatgtgtattttactaaagctggctagaaacgttcctgcagtgatagcctctaagtgtttgctgaattgcttcagactgtacaggcatgactgtatgcacatggcaaacaggggaagagcactggctactgtgcttgcctgtttacttccttcttgcttctgtgagaggctgggccttgagcactgaatcaccaacctttgttggcttagttttgctcagtgtgaggttcattaaagctatgcttgccctaagtctatagccactaggtggagcttgaagactatttaaaactcacctgacactttcatctagacaaaatgatttatcttttaattaacctatttacgttgtgtttggaagaggctgcctgtcatggtgccatccagtggaggtcagaagacaacttgccaagagtctgttctctgtcctcctccttatgggctccaggtatcgagcgcaggtggtcaggcttggaggcaagcgcctacctctgcctggccagccgtctccctggcccctaggttttcttctagttgcgagacatactttcattgtgtgctaattgagttgtgaagcattccatatttttaaagtctgtaaatttttaaattatcaattttaaagactaatatggtttatatttaatcctaaactgaaaaaaaaagcttatttcttaaaacttgagaaggcatccaaatatattctagtctgtattacaagtatgttcaggcctttatttgaaacagtaaaacggcgtcctcgggattcattcactccatccttggaatctagctctgtaaaatgggattcccacattgacaggacagttcagccttgtgactcaagcctaactgtaagtttttaggagaatattggagcataatcataaacgagtcatgtagtgacgtctggtagaaattttcagtgtatctattttccagacttggtacagttgtaggattggaatattattgtggtttataattgctgtaattgacaaaactgtcactgtagagttaggatttaagttacagattagattctctatgagtagacctgtagaggtaagtgaatttaatttagctcatcgctgttcctagtaacagtgagtcaaagaatgtttttcatcttaatacctcattattcactattttcttttttcttactcttgcaggcttccgttttagaaaacctgaggctagctgtccgatctcagctgggatttacttcaatcaggcttcctatgacaggcagatctagcaacatttggaatcgtatttttaattttgcaagatcccgtcattcagggtcattggctttggtctcgggagatggagatgaggttgtccctagccagagcagcagcagagaaactgagaggagtcgccctcacagaagcttattctccgtggagtccgatgacactgacacagaaaatgagagaagggatacggcgggagcatcgggtggggttgcagcaccgttgccccagaaggtccctcccacgaccgccgtggaggccacagtgggatcaggtgggaattcctctgctcagagcaccagaggtggccatgcagatggaagggaagtgtcaagtgtggaagccccgagtgtgagcccagcacgtcaccagctcacaagtgctttaagtcggatgactcagggcctgcgctgggtccgctttacactaggtcgatcgagctccactacccagaaccggagtcctttgagacagctggacaccgcagtgagtggacgagaagacgacgatgacgtcgaaatgctaattccagtttcagacggagcttcggacattgatgccaatgactgctccagacctcttcttgaccttgcctcagaccaagtacaagggtttagacagccacacagtgcaggaaaccctggagtgagaacaagtaaccgggacggcccctgcgagcgctgtggcattgtgcacacagcccagataccagacacttgcttagaagccacagtgaagacggaaacgagtgatgacgaggctttgctgctgtgttaggacagaatcgccagactgtatgcaagctggagcaatatccactcactgttttgtaactttacaattaaactagttttagtttaaaatgaaaagatgcagggtgatttcttattatatgttagcctgcatggttaaatttaacaatgtgtaactctaggagctagagtttgctgttttagcagctaaaaatgcattatgtattcgtagtcttcagtcatgttcttccgtttgcttatacctggttttgttttgtttttttaaatcctggtacttaagtttaatagtagaaatatggctgctttattcatgtaactgccattttatctatcttatgttaaaaggttggtttgtacaaaacggtaccttctttccattgactcttggatgctctttgccatcatgtaacttattatactagatgctgaggttgttaatgtacaaaaaaggagacagctccttagagtcacctctttgtttgcataacactgtctgctagtagatttcatcatatggacctgtcgcaggcaaagaatctgctctctcattcaacacacagtgatgtaaaagttccgtggcgttcgagaaaattgctgtcgggaaacaaaactcttttatagattttctaatgctgactttactactctggtgtggttcagaccaaatggtgaaatcccaacacgtttctgttttcatctcaatttagggacagaagtaagcggatgaagattctctactatgcattacattttgaactttataaaataggtacagaaattgtacccgctcagctccacggggtaatgtctttccctgacacggaggtttgcctgagttggaccctagggatttgcactacagtcctgtcaaggtctcagatgagtttagcgcacaggcactgtcacagcaggtactgtcattgctaccacagtgacgttatatttccatagctttggggctgggggaccatttttattacaacttgaaattgctttgctggtttcatatttatttgttgtatttaaaaactgcattattgtgagagtgatttttttccaggatattttattcttgggggagggggtcagtgctataatcttgaagaaaagcaaattaaagtgttcagattgccccccctctttaagtagagggaattacaagccccatttatttttctttaattgttaattcttgtttatttattccttagctgtctgttttagcagcttaatgattgggtatgaaatgtgtttgtgtgtgattatcgctatttattacaccttcagtactttgctgaatgtcattttaaagcatgtttgaggtcttgtgtatctgtcctgttatgctgtcaggaagacctgacgaaaatgttttaatatgtatcaaaaattaaaataattttttttattgccttgaggtacttt

SEQ ID NO: 118 - DNA, 3959 bp, Mus musculus
gggtcggcgtggctcttgcttttcctcgctggggtgtacggaaatggtgctcttgcagaactttctgaaaatgtgcatatttcaggagtgtcaactgcttgtggggagagtccagaacaaattcgagcaccgagtggaataatcacgagtccaggctggccttcagactatcctgcccaagtcaactgcagctggctcataagggcaaacccaggggagatcattactataagttttcaggattttgatatccaggggtccagaagatgcactttggactggctgacaatagaaacatacaagaatattgaaagttaccgagcgtgtgggtccacaattccgccaccatatatctcttcccaagaccacgtttggatccggttccactcagatgacagcgtgtccaggaaaggcttcaggctggcgtatttttcagggaaatctgagcagccagactgtgcctgtgatcagttccgctgtggaaatggaaagtgtattccagaagcctggaagtgcaacagcatggacgagtgtggagacagttctgacgaggaggtctgtgccagcgatgctcaccccccaaccacgactgctttccaaccctgtgcctacaaccagttccagtgtctgtcccgcttcaccaaagtttacacgtgtctccctgagtccttaaagtgtgatgggaacattgactgcctggacctaggagacgagatagactgtgacatgccgacatgcggacaatggttaaaatacttctatggcaccttcaattctcccaactaccccgacttttatcctcctggaagtaactgcacctggctgatagacactggtgatcatcggaaagtcatcttacggttcactgactttaaacttgatggtaccgggtatggtgattatgtcaaaatatatgacggactggaggagaatcctcgcaagctcttgcgggtgctaactgctttcgattctcacgctcctctgacggtcgtttcttcctccggacagataagagtacatttctgtgctgataaagtgaatgctgcaagagggttcaacgctacttaccaagtcgatggcttctgtttgccatgggaaataccctgtgggggcaactgggggtgctacacagagcagcagcgctgtgacgggtactggcattgcccaaacggaagggatgaaatcaattgtaccatgtgccaaaaggaagaatttccatgttctcgaaatggtgtctgctaccctcgttctgatcgctgcaactaccaaaaccattgtccgaacggctctgatgaaaaaaactgcttcttttgccagccagggaatttccactgtaagaacaaccgctgtgtgtttgaaagctgggtgtgtgattcccaggatgactgcggtgacggcagtgacgaggagaactgcccagtcattgtgcctaccagagtcataacagcagcagtcatcgggagcctcatctgtggcctgctgctcgtcattgcattggggtgcacttgcaagctttattctctgagaatgtttgaacggagatcatttgagacccagttgtcacgcgtggaagcagaacttctccgaagagaggctcctccctcatatggacagttgatcgctcagggactaatcccacccgtagaagattttcctgtctgttcacctaatcaggcttccgttttagaaaacctgaggctagctgtccgatctcagctgggatttacttcaatcaggcttcctatgacaggcagatctagcaacatttggaatcgtatttttaattttgcaagatcccgtcattcagggtcattggctttggtctcgggagatggagatgaggttgtccctagccagagcagcagcagagaaactgagaggagtcgccctcacagaagcttattctccgtggagtccgatgacactgacacagaaaatgagagaagggatacggcgggagcatcgggtggggttgcagcaccgttgccccagaaggtccctcccacgaccgccgtggaggccacagtgggatcaggtgggaattcctctgctcagagcaccagaggtggccatgcagatggaagggaagtgtcaagtgtggaagccccgagtgtgagcccagcacgtcaccagctcacaagtgctttaagtcggatgactcagggcctgcgctgggtccgctttacactaggtcgatcgagctccactacccagaaccggagtcctttgagacagctggacaccgcagtgagtggacgagaagacgacgatgacgtcgaaatgctaattccagtttcagacggagcttcggacattgatgccaatgactgctccagacctcttcttgaccttgcctcagaccaagtacaagggtttagacagccacacagtgcaggaaaccctggagtgagaacaagtaaccgggacggcccctgcgagcgctgtggcattgtgcacacagcccagataccagacacttgcttagaagccacagtgaagacggaaacgagtgatgacgaggctttgctgctgtgttaggacagaatcgccagactgtatgcaagctggagcaatatccactcactgttttgtaactttacaattaaactagttttagtttaaaatgaaaagatgcagggtgatttcttattatatgttagcctgcatggttaaatttaacaatgtgtaactctaggagctagagtttgctgttttagcagctaaaaatgcattatgtattcgtagtcttcagtcatgttcttccgtttgcttatacctggttttgttttgtttttttaaatcctggtacttaagtttaatagtagaaatatggctgctttattcatgtaactgccattttatctatcttatgttaaaaggttggtttgtacaaaacggtaccttctttccattgactcttggatgctctttgccatcatgtaacttattatactagatgctgaggttgttaatgtacaaaaaaggagacagctccttagagtcacctctttgtttgcataacactgtctgctagtagatttcatcatatggacctgtcgcaggcaaagaatctgctctctcattcaacacacagtgatgtaaaagttccgtggcgttcgagaaaattgctgtcgggaaacaaaactcttttatagattttctaatgctgactttactactctggtgtggttcagaccaaatggtgaaatcccaacacgtttctgttttcatctcaatttagggacagaagtaagcggatgaagattctctactatgcattacattttgaactttataaaataggtacagaaattgtacccgctcagctccacggggtaatgtctttccctgacacggaggtttgcctgagttggaccctagggatttgcactacagtcctgtcaaggtctcagatgagtttagcgcacaggcactgtcacagcaggtactgtcattgctaccacagtgacgttatatttccatagctttggggctgggggaccatttttattacaacttgaaattgctttgctggtttcatatttatttgttgtatttaaaaactgcattattgtgagagtgatttttttccaggatattttattcttgggggagggggtcagtgctataatcttgaagaaaagcaaattaaagtgttcagattgccccccctctttaagtagagggaattacaagccccatttatttttctttaattgttaattcttgtttatttattccttagctgtctgttttagcagcttaatgattgggtatgaaatgtgtttgtgtgtgattatcgctatttattacaccttcagtactttgctgaatgtcattttaaagcatgtttgaggtcttgtgtatctgtcctgttatgctgtcaggaagacctgacgaaaatgttttaatatgtatcaaaaattaaaataattttttttattgccttgaggtacttt

SEQ ID NO: 119 - protein, 667 aa, Mus musculus
MDECGDSSDEEVCASDAHPPTTTAFQPCAYNQFQCLSRFTKVYTCLPESLKCDGNIDCLDLGDEIDCDMPTCGQWLKYFYGTFNSPNYPDFYPPGSNCTWLIDTGDHRKVILRFTDFKLDGTGYGDYVKIYDGLEENPRKLLRVLTAFDSHAPLTVVSSSGQIRVHFCADKVNARFNATYQVDGFCLPWEIPCGGNWGCYTEQQRCDGYWHCPNGRDEINCTMCQKEEFPCSRNGVCYPRSDRCNYQNHCPNGSDEKNCFFCQPGNFHCKNNRCVFESWVCDSQDDCGDGSDEENCPVIVPTRVITAAVIGSLICGLLLVIALGCTCKKLRMFERRSFETQLSRVEAELLRREAPPSYGQLIAQGLIPPVEDFPVCSPNQASVLENLRLAVRSQLGFTSIRLPMTGRSSNIWNRIFNFARSRHSGSLALVSGDGDEVVPSQSSSRETERSRPHRSLFSVESDDTDTENERRDTAGASGGVAAPLPQKVPPTTAVEATVGSGGNSSAQSTRGGHADGREVSSVEAPSVSPARHQLTSALSRMTQGLRWVRFTLGRSSSTTQNRSPLRQLDTAVSGREDDDDVEMLIPVSDGASDIDANDCSRPLLDLASDQVQGFRQPHSAGNPGVRTSNRDGPCERCGIVHTAQIPDTCLEATVKTETSDDEALLLC

SEQ ID NO: 120 - DNA, 99764 bp, Homo sapiens
ggtggctcggcggcggcggcggcggcggcggcggcgtcggcgtcgtctacctccagcttctcctccctcctcctccgtctcctcctctctctctccatctgctgtggttatggcctgtcgctggagcacaaaagagtctccgcggtggaggtctgcgttgctcttgcttttcctcgctggggtgtacggtaagtgtccgcgtccccgcgccccgctgaccgaacaaagctgaggcgacccgggccccgaggcctccaggacgggggttcccctggagactcccgcggagaccctggctaccggcgggacaaagaccggtgagggggtggatgtggcggaacgggtgtccccacacggagatgcttttctccactcgtccacctccagaccctcgggtggtggagaggggctggggggcccggccgggagggccccggcggagcgagggggtggcgggcggacttcccgacctgggttcgagggcccccgcggccagttgctccaggacccgtagcctggcacaatccacacacaaagatgcttgactgtgagaaagcagaggagctcgcccccgccgctgccgggacggtccttccccccgccccctcaacccggggttaggaagttctctcaccggcgagattcccaccgcgccagcccttgtcctactcgattccctgaaaaggcttcccgctgacttctccccactccacctcgggggcaagggctctgccgaatccgggcgtgcagggtcctgttggttccccgggagcagcacgcgggagaaggccagaaaatagtttccagccccacctcagtctctcctgttagggtgtacacatctgtcctgactcctagttcaattgtaatttcatccatcctcgtccgccgctgtggtcactgttactttattccagtcgatggatcgggttagagataactcctttcgggttaagagaaggctgaagactgtgcggacagctttatattgcgttggggtctgagcaagagctgaatggaattaattgcaaagaacatctatctcttaagataattaagttacacttctgacttcaccgttcttagttcatcagttaaacacactgaataggtatttcagagagctcagttttaacctttcctttttggagtgttgctctgatttctccagaaaaagaattagaagatatcattactttggtaaattttacttataaaaagtctaattcatttgccacaaacattgatttgactagtataatggtggtggtggtgaggtttagtcaacagccaatttgtcagcaagtgttatctcttttgaaggcatttatctacggaattgaatgtgatggtggcttttgaaacctggcaagtgacgctaaatgaagaattaatgaacgtaattgggcatttactgacagccaagaaattctttttggtacaattaaggatgtgttgctcccgtacctgattagtagtatttttgtttgttttggtgaggagagtagtttggtccattttttatgtaggggtaattgccagaggtgtgcttgtgtgggaccaaaaacccagtacacgacttttgattgttagctgcatcaagtggctgtaatccctgcttgcctgatgacttgtgggtttgggtctacaccagagatcaataagctattacgttgtttcttctgccctgaaggtgggtatagttctgctctaggtttggtgtaatggcccaggagagagaagaaattgagaggtatctttaatttagggtgattaggattgtccagctttgtcctctactataataagcattgaatttctgtgatgtccgatcagaatagataaataaatgggctcttctttcattaaaacctgtgtcatcagtgtttgaactagaagtcttttgcctcgagggataagaggctgtgaacccctcaatttgttttggtgcattctttagtacttgtacacaaagtgactttctggtaggtgcctatcaaagcttttatctttttggaatttgtgttcagtgaggaacacaaattgttagtaagcaaagactgaaactcctttttccaacagtgtgggccgcagattataaaaccagcaggtgattatgccaaaggttgatgtctcaagccacagcaggtttcaaagtgtaaaaaaaaaaaggaggtagtgaaccaggcagaacattaaactatatcagcagagattaaagggaacccttcaccctggaactgagaaatcctctttatggctgcatgttttttgtcctcttctgtctctaaccatatgtgggtttataatagtgaaaaagggctgtaacaatagtatggggtggatgtggttctataacaatagtgggaattgagtaacttagaatatatagtagttgtaatgggtggtggatgcatcctgagaaatagctgtcgccttgagcctgttagaacagatactagctgtaatttatgaaactgtcctctatacagtaaaaagtgtgtgtgtgttttaaaaggcttcaaaaataattagctctgttaatgaaactgaatattcacaatcactgttaacaaagaaaagcaggttgattggccaatatttagggaactccaatattaattcttcacagagtgactcttaaatgaaatgactctaaggtgtgcttcagatttttgaaacatttcacatacataaaaaaattttttgttgtttattttggtgctactttccagatgacgattttatgggctctgatatgtgactgttgtacttccaaattaacttttctgaatgccagagtcttacctgaaactctaaattgtaatctagaatataatgttttctagaagtagttgttcaaggacctgtaattatctttcaggggctactgtatcttaaccgcattcaatgtgcctaagagttaggagagagtaaaggttgacctctgccacctttgaaagtttgaagggataaaaatatcagtggtgacaaccacaagctttgctacgcattgtcctaggcttactgtaagaggaaaaagtgctttgtcatttttcacatagggatgtctcgcttttacaaatctatgggagtttccaaaacctctgtctcctagtcaatagaagctgttagtcttgctcacctcctaaaccacaatttggtaattctgacagttccgttgctttatcctttccacttctgtttgtctcccagattagtgtttcctaacttttactcaaacccacccttaaaatacacattgcttcgggtactatgtacatagagaaaaaagttaatgaaatcgtactcttaactacctgtgcactcagatgttttctatttattcctcctctttctcacccttcccttcttcatttgctggtctggactcattaaataaattttggatccactaataaattgcagtccttagcttgaaaaacactacccaagatgaagccttaaaatatagtttagaggccaggcgtggtgactcaagcctgtaatcccagcactttgggaggctgaggcgggtgagtctcctgaagtcaggagtttgagaccagcctggccaacatggcgaaaccccgtctctattaaaaatacaaaaattagccaggtgtgctggtacatgcctgtaatcccagctactcaggaggctgaggcaggagaatcacttgaaccaggaaggtggaggttacagtgagccaagattgcacgattgtattctagcctgggtgacgagtgaaactctgtctcaaaaaataaataaataaataaatgtaatttagaatgtttcttgtttgtatatcattttacaataaacttcaagagttgcagatggttaatttttggttacttgctgccagagcatttgatagtcgtagaactgttcacagcatatactgattgacttgtgataaaattcatttttaaactggttttcagcttattacagtcaagagtctttactgttcacagtagtattctagatgttgtggtagcctaaaataatctttttactttgcatatatgtaatggatgaatcttttcccatgaattttatggaatgttcagtagcacttaataactggtttaagggtagacaagaaattccaattttagaaaggttgtagaagtaactggaacatgagggaaaaatctaaaccagataccaattacttcttacaaagtcaagtttgattacataaaatgtgttgaataaaattgaattaattgcttaacataaacccttccttgagttcagaatctaaattatatccatatccttgggagaatatgaaggtgggcagcacattccacaaaattctaggtggttatcagggcagaaagtattaaacaagcactgttaactgtattctagatagagtatggaggagatttgaatgatgtatggtaaatgatttataaggttcctagaaagtaaaatttcttttgaagaacataaaagggattttagcctgaaaagtgagcagcagttaaagaaaatgttgagatttacttttgtaattagaaaatttaaagcttattaaaatattaagggaacaagagggcctttttgtgtttctgatatgagatgttgttccttttttttttccccactttaccagtgataccacaatttaaggggtgaaagttcagtaaaaatatatatgaaatataagtgagaattatatagatttaagtaaacatagaatatttttattttagatattaatcctgttcttactgcaagtctttataagaagaggaaggttgttctaaatttaggaattggaagttgatgatctctaatttctaaggttacctttcttttctgtttttcttcttttctccttatcactccctgctttttgagagagttaagtaatagatgtacattatttattcccattttctaaaatttaggattagatcctgcaaatacaaattaccaatgtatctattcaaatacatgttatcagagtctcttctttttaagtatatataaatatattatttcaatactgtattagcttagggaattcttactgtctaagttatagaagggaaggaaggaaactaacattaaattaagtttaatagcacttatttacttacaagtacttaatacttacattgaaagatgcgtgattagtctttatttattgccaattaatctttagtaggtcttatttggcaatcctgtcagatatgtactctttcttttgttttatggaagagaacattgaaacacagaaatattgtgacttaactgaagtcaaaccagtatgaagtagtagagtcaggattgtagcctaaccctggctgtctcttcacttagttcatttagcaaatatttattgagcccttgcttatgtctagcactgtgttagataaaacctgatgcacatagtttctgccctcatggagcttatagtctaatgaataagttgtaataagtgctctcaaagaaacagacacggggcagagatagtgagtaacaggcacagagtaattaggggaagactttttcatgaagggacgtttatgagacctaaagcatagctaactgtgttatggttgggtaagaaagctttacatatgagaacaatgcatgaaaggcccaggatcaggaaagagctggtatgttgcagataaattactaaaaacactgtaactggaacataatggttgtaagggagagtgacaggatgagattagagcaatacttagaaactctaggatttagaatccatggtaaagagtttgggttttattttaactatttaagtgacataatgtgatttatgttttgaaacagtcacatttgctactatgtggagtattgttgtgaagtgggaaacagtagagatgggatgatcagttaggagattttggctgtaatccaggtgagagataacaggagcttggaccaaggtagtagtagtggagataaaggagtgtaggttgccctgttgatagagataaggggatttttcctcttgccgtaagaggtaaagaagaaaatattggtgcaagtgtacttaggtctgtaggttttggggtgggaaggtggacattacatctgatcgttcttattttctcaaagtaatatgacataagatcatcagtgaagaggaggaatgagaagttgagggtgatttttgttccctcaattcagtagaatggtttggacgcttagcaagttagatttctgttatttaatctagaatagagaaggctatgaacactatacaagcacatatattatgaatagttgtacagcagatgacaggaagagatggacttaaattacaaggggaggaaccttaagaagggttctgtggagaactcagttctgagggcagtcattttgtcaatgaaataagtatagaacataactttttacaatgttttaagtgtatttcaggcaagaagcaaagggtggagcaaaagctggatttccaatacctttttgccaaagttaaatgctttctgctaagctatcaataaagattgctttagaaatcagattgtctttggtagaggcaagaatgtattaaaagattggtgaatttcagagcagatttggaaaaattgagcttttatcttttttttttattgtgtagctttacagaagatataactttagtaggtcccaaaacttcaaagtaaataaaactgacaaaagagttttctagttttcctcttaaatagttaataactcatttacttgctggtatcagtttggtgaagatgtgaaattgttttatgctcatgttttgtcattgagtgagactaacttgatacctacctttaattcacttacatttcagtttttagagaaattaaaaatgatgccaatcttttaatattaggattaaatggagcacaataggatgtttagtagttggaatttactttttcaaatataagtgagtaaacctttcataatctgacttaatttcattaatagttaaggcatctttttacatatattggagaaaacataagaataatctttgtatctgatatattttgaagtagaattgtttcgtgaaattattattgcttgtgaaagttttgctaagagaatacagaacacctatacaaaaaatgccatgattaattctcaaaatcattgtgtgaggtaggtattattagaagaaactgaagctttgagaatagtagttttgcctaaggttcatgtctgtctactgctgtgctcttcgtgtagaggcccattattttttttttgtctacattattgtaacagccaccaactagtcttagctctagtcttgtcctgattgaatcatatcacacttagcagtagccagagtgacttatctaaagtacagatctgataatgtaactttcttgcttaaaacccaacagcagttccctgttcttaaaatataaattaaactcagcagagctttcatgatctggctagttttttttttttcacttttaagttcaggagtacatgtgcaggtttgttatataagtaaacttgtgtcatgggggtttgttgtacacaattattacatgggggtttgttgtacataattattaatctgtttgttgtacagattatttcatcacctagtgatatgttacatcatatctagtgatatctgtacatcatatcgtatatagtacccagtagttattttttctgatcctctcctttgtcccacccgccaccttctgacaggccccagtatgtgttgttccccttcctctatgtgtccatgtgttctcatcatttagctcccacttataagtgagaacatgcagcatttggttttctgttcctgcatttgtttgctaaggataatggcccccacctccatccaagttcctgtaaaggacatgttcttgttcttttttatgactacatagtattctatggtatatgtgtaccacgttttctttatccagtctgtcattgatgggcatttaggttaattccatgtctttgttattgtgaatcagtgctacaaggaacataacacatgcatgtgtctttataatagaacaatttatattcctttgggtgtattcccagtaatgggattgctgggtcaatgatatttctgtttttaggtctttgaggagtcgccacgttgtcttccacaatgattgaactaattacacttctcccaacagtgtacaagcattcctttttcaccacaacctcgcaagcatttgttatttttttgaccttttaataattagccattctgactggtgtgagatggtatctcattgtggttttgatttgcatttctctgattggtgatgttgagctatatttcatatgattgttggctgtatgtatgtctttttttgaaaagtgttcatgtcctttacccagttttcaatgggtttttttcttgtaaatgtgttttaagttctttatagatttagattaattttttgtttgtttgttttgttttttttttgaaacggagtcttgctctgtcgcccaggctggagtgcagtggcacaatcttggctctctgcaagccccgcctcgcgggttcatgccattctcctgcctcagcctcccgagtagctgggactacaagcacccaccaccatgcccggctaattttttttttttttttttttttatttttagtagagacagggtttcactgtgttagtcctgatggtctcaatctcctgacctcgtgatccacctgcctgggcctcccaaagtgctgggattacaggcgtgagccaccgcacccagcctagattagttcttaatagatgctggatattttgcaaattatgaatctttgtcagatgcgtagtttgcaaaaattttctcccattctgtaggtagcctattcactctgttgaccgtttcctttgctggacagaagctcgtcagtttaattagattccatttgtcaatttttgcatttgttgcaattgcttttggcatctttatcctgagatctttgcctatttttgtgtctagaatggtattgcctagcttgtcttccagggtttttatagttttgggttttatatttaagtcttcaatccgtcttgagttaatttttgtatatggtgtaaggaggggtccagtttcagtcctctgcatatgactagccggttaccccagcaccatttattgaataaggaatccttttcctatggctcatttttgtcaagtttgttgaagatcagttagttgtagatgtgctgccttatttctgggttctctattgtgttccattggtctatgtgtctgtttttgtacgagtaccatgcagttttggttactgtagacctgtagtgtagtttgaagttgggtagcatgatttcttcagctttcttctgtttgcttaggattacctctgctatttgggctcttttttggttctatatgaattttaaaatagtttcttctagttctgtgaagaatgtcaatggtcatttaataggaatagcattgaatctgtaaattggtttgggcagtatggccattttaacagtattgattcttcttacccataaacatagaatgttttttcatttgtttgtgtcatttctgatttctgtaagcgtagttttatagttctccttctagagatctttcacctccctggttagctgtgttcctgggtattttattctttttatggcagttgtgaatggaattacattcctgatttggcttcagcttgactgttgttggtgtataggaatgttagtgatatttgcacattgattttatatcctgtgaatttgctgaagtagttaccagcttaagaagctttgggcccgagactatggggttttctacatataggatcatgtcatttgcaaacagggataatttgacatcctctcttcctatttagatgcgctttatttatttcttttgcttgattaccctaaccgagacttccagtactatgttgaatagcagtggtgagagagggcatccttgtcttgtgtcggttttcaggggtcatgcttccagcttttgcccattcattatgatgttggttgtgggtttgtttgtcatagacggctcttattattttgaggtatatttcttaataccttgtttactgagagtttttaatatgaaggggtgtggagtttcatcaaaagccctttctgcatctgtcaagataatcatgtggtttttgtctttagctctctttatgcgatgaatcacatttattgatttgcatatgttgaatcaaccttgcatcccagggataaagcctacttgatcacggtggataagctttttgatgtgctactggatttggtttgcaagtattttttgaggatttttgcatcagtgttcatgaagaatattggcctgatgttttcttttgttgccagtaagttttttgtttttgcttgtttgtttttttaataccaaaaccgccatcaggttttggtatcaggatgatgctgacctcatagaatgagttaggagggagcccttcctcttcaatttttttgaatagttacagcaggaacagtaccagctcttctttgtacatctggtagaattcagctgtgaatccatctgggcattttttggttggtaggctgtttattactgacttaatttcagagtttgttattagcttgttcagggattcagtttttttcctggtttagtcttaggaaggtgtatgtgtccagtaatttatccatttcttctagatttttctagtttatgtgcatacaggtgtttgcaacattctctgatgattgtatttctgtggggtctgtggtagtatcccctttgttgtttctgattgtgctcatttgaattttctctcttctttattagcctagctagtggtctgttttattaattttttcaaaaaaaaaaccagctcctggatttgttgatgttttgaatggttttttgcatctcagtctccttcagttcatctctgattttggttatttcttgtctttactagctttgggatttgtttgctcttggttctctagttcttttagttgtgatgttaagttgttaatttgcaatctttctaactttttgatgtgggcatttagtgctataaatttcccttttaatactgccttagctgtgtcccagagattctgggatgttgtatctttgttccattggtttccaagaactttctttttcttttttttttttttttttgagatggagtctcgttctgttacccaggctggagcacagtggcgcagtcttggctcactgcaagctccgcctccctggttcatgccattcccctgcctccccctcccgagtagctgagactacaggtgcccaccaccacgcccagctaatttttttgcattttcagtagagacagggtttcaccttgttagctaggatggtctcaatctcctgacctcgtgatctgcctgccttggcctcccaaagtggtgggattacaggcgtgagccactgctcccggcctgtttccaagaacttcttgatttctgcctgaattttattatttacccaaaagtcattcaggagcagattatttaattttcatgtaattgtatggtttttagtgagtctcttagtcttgattcctaatttgattgcactatggttcaagagattgttttttactatttcatttcttttgtatttgctgaggagtgttttgcttctgattatgtaatcaattttagagtacgtgccatctggcaatgagaaacatgtatattctgttttagggcggataattctgtagatatctgtcaggtctgtttgatctagtgctgaattcaggtcctgaatatctttgttaattttctgttttgatgatctaatactgtcagtgaggtgttaaagtctcccactattattatgtgggagtctaagtctctttgaaggtctctaagaacttgccttatgaatctgggtgctcctgtgttgagtgcatatatatttaaaatcttcctgttgaattgaacccattaccattatgtaatgttcttctttgtctttttcgatctgtgttttaaagtccattttatctgaaactaggattgcttttttcttttttccatttgcttggtagatttttctctctttattttaaacctatgtgtgtcattggatgtgagatgagtctcttgaagataccatacctatgcatcttggttctttatccagcttgccattctgtgtcttttacttggggcatttattccatttacattcaagcttagtattgatatgtgtggatttgatcctgtcatcatgatgtttcctggttattttgcagacttgtttatgcagttgctttatagtgtcattggtctgtatacttcagtgtgcttttgtagtggctggtaatggtccttccttcccatgtttagtgcttcattcaggagcccttgcacagcacgtctggtggtaacgaattccttcagcattcgcatgtctgaaaaggatcttatttctcctttgcttatgacgctttggcaagatatgaaattctgggctggaatttctttaagaattttgaatattggcccccagtctcttctggcttgtagagttgctgctgagaggtgtgctgttagtctgatggacttccctttgtaggtgacctgctttttctctctagctacctttaatattttttctttcattttgaccttggagaatctgatgattacacaccttggggatgatcttttgaaatgtcttacttgagttctctgcattttctcaatttgaacgttggcttctctagctaggttggggaagttctcatggatgatatcctgaaatatgtttaccaagttggttccattttccccatctctttcagagacaccaatgagttgtggatttgatctctttacataatcccttatttctcagaggttttgtttgttcctattcattcttttttctgttcttgtctgactatcttgtttcagaacgccagtcttcaagctctgagattctttcctctgcttggtctgttctgctattaatacttatgattgcattatgaaattcttaaagtgtgtttttcagctctatcaggtctgttacattcttttctgtagtggctgttgtctgtcagttccagcgttgttttatcatgatttttagcttctttggattgggtttcaacgtactcctgtagcccagtgatctttgttactattcatattcaaatttctatttctgtcattcagtcatcttagcccagttcagaacccttgctggagaggtgatgtggtcatttggagggaaaaaggcactctggctttttgagttttcagagttcttgctctggttcttactcatcttgtgggcctgctaccctcaatctttgaggtttctgatctttggatttttttttcccttttatcctatttgataacttcgagtgtttgtggtataaggtggatccagctgactgacttcatttctggaagattttagggggccagtgctcagctcccgactcctggacggcttgctcttaactctgggggacttgtattgggccccgactttgttctctggttcttcaaggcttcgaaatccactgcgctggattgggggaccaacttgcagcacctgtggcagagcactagcagtgccagggtgcctgccttcctgtgggtgttcaccacagtggtggaggcaatgcagctggtcagggtgtcagggacctgctgctggtaactggaggtgatgttggcttggggctctagtcacactgaagctgatgttggcttgggggcagggcactggtggatctggattccttctctgtgccctgcaagcaggaatgatcactcaggggcaggggatctggctagtttttatctttctgcctcatcttggtcattccccttcacccctgcccttccccctctcccacaccatgttcctgccatacttgtgacttccagtctttatacacgctgttccctctgcctgccttatttctttctccaccactttcttctctaggttaactcctgctgtccttcagctttcttcccattgctgcctcctttggggagtcttcctggttcctcaaaactaagtgcccttcttagaagcatctcagatataatgtgagcctcaagtgtaaatcacatatgtagttttgaattttctattaaccacatttaaaaaaaagaaacaggtgaaattaatgttaatattttaaaactaatatatctaaaatactatcatttcaacacgtgatcagtagaaagtaattattaatgagaagctctacattatgtttttcatgctcagtcttcaaaatccgttgtaaattttatacttacagcccatctcaattcaactaaccacattttaaatgctgaaagccacttggaaaacagtgtctattaaagctgtatgtaaacatgtcctgtggcccaggaattctgcctctagatatgaactcaacaggtatataatgtgtgacaaaagacatgtacaagaatattcatagcatccttattggttataatcccagactagaaacaaccctatggccatcagcaatagaatagatgaataaattatggtatattagcataagataattctgtttagcagcagtttccaaactttcgggtcgcaggactccacagttattgaggaatccaaagaatggtttttgtataggagctatatatgtttttaagaatattaggaattaaaattgagtaattattaaaacattaattcgtttaaaatgacaataagaaacctattacatattaccgtaaataacatgttaaataaaaatatgtaagatgacaactatattttccaacagaaacaaaaattttttgagaatagtggcattgtcttagtttttgcaattaccatagggtcagatttatatgtaaaacatatttagtataatgccagacaatacttgttgaataaatgaattcatctatctataaatggagtaaattacatttatgtgattcctaatgttgaatcatttttgcattcattcatagggcataccaccttgctaatgatatattttaatctgctagaatacatttactgataatttttatactttgcatttatatttatgacatcagtccatagtcagtcttagctttcttctgccctctacctctttttttccttcctgtaacctaacctccctcttcttctgcttgattttcatatctgttaatccattcttttagatgcacttacgatcttttttttgttgagttcagtgtttagaagtagtataaaagattctagtgttccagttattattattttgccttttaagattagaaaaagagaagtaagtgattgtttatgaactatataggtactgtaacaggaaagcaaaaattaaaaattttgtactaataaatgccgaggggagaaatgttttcattcctagtatgtttagactttatttcactaaccaagataatacagatgagcctgtaagaagtagatcccttcttacgcatcagctataggattaagtaagccagtaagagacctcagtggagatagatcagttccattagaagtggaactcacatctgaaggcaggagctgtgtgggaggtaaaatggagatgctaaatgaggactgagctcaagtcagggggtaggactcctgtattctgtcagtagggtacatccggtttgtgtggatgacactttaagaccaaactaatttgctcaaaaagtagcagacataaagttaaccaaaatatggctccagtgctatctaaactatgacctagtagtgtactaacatgattacttgtatgtaaaagtatttgcccaggtacaaaggatgggagattaaggagaacctactactatcggtgctgctggagtggatcactgcacaggggctaggagccatatgaaaaatacaatcgagtattaagaaattgcataaattacatttgtatacgattcaacttaacattattttttctactacgtaagaataagaatctgagtgtttgatttgattgctttgtgtgggtgggttagagagaattagaatacatgatttatctctggtctttattttattaattcttttattccctgatctaagtagggggctagctacgataaatagaaattatgttttttaaaggtttatttgaactctactctaaaagcatatgtccatgatgcctttggggaaataactctaattttcaattccttcatccttgagtcagttttgctaatttatattaagttatatgttctagaacattattttacctgtatttccatatttgctttaaatttataaataatattatttttaaaatattttctacatccgtgattatatcaccatagtcattcctaatacccatctgtctcttgtctgtcattcttttcttgaacagacttatcaaaggtttctttattttagacgttcttctcaaagaaccagctcttggtttcatgctgtactgctttccttgttttctgttttattaattttctttcactatttctttattttgttgattttttagctggttgtttatttttaaattttgttttatacattatacagtaaaactgactctctttttttctggtgcagttatgtgactgttaacacatgtacacattcatgtagctgccactaaaatcaggatgtagaacagttcatcacccccagaaaactcttgcctgctcttcctttatagtcacaaccatgtcctcacccataatctgtgatagccactgagatgttcctaaccatagttttgtctttttaagaatgtcatataaatggaattgtccaacacataaccatttgagactgactgcttttactcagcataatatcttggagattcatgcacattgttgcatcaatcactagttttattccttgccattttatggatataccacagtttatcagttcacctattgaaggacatttccattgttttcagtttttagctattataaataaaacttctacaaatatccagtacaagtttctgtgtggacataagtttttatttctctaggtcagtggtccccagcctttctgacaccagggaccagttttgtggaagacaatttttctgcagacctggtgggaagggaggatggtgttggaatgaaactgttccacctcagatcatcaggcattagattctcataaggagctcccaacctagatcccttgcatgtgcagttcacaatagggtttgcagtctgccaccaggaggtggacctcaggtggtgcattagtctgttttcacactgctgtaaagaactgcctgagaccaggtcatttataaaggaaagagatttggttgactcatagttcagcatggctggggaggcctcaggaaacttatggtggaaggtgaaagggaagtaaggcaccttcttcacaaggtgacaggaaggagaatgaacacaggaggaactaccaaacaattataaatcatcagatctcatgagaactcactcacaattacgagaacatcatggaggaaaccacccccatgattcagttacctccacctgatctctcccttaacacatggggattataaagattatggggattataattcaagatgagattttgggtggggacataggcagaccttatcaggtggtagtgcttgctcacccaccactcacttgctgctgtgctgcccacttcctaataggccacggcccattactggtctgcagcctgggggttagggactcctgctttaggataaatacttaggagaagaattgctgggtcctaagttacacatacatgcttaactttttcagaaactaccaaaccgttttccagagtgactatatcagtttgcattctgactagcagtgtgggagtgtttcagttgctctgcatctttgtcagtacttggtattgttaatatttttatttttgtcattctagaagggatatggtggtagctcgtctggtttgcatttgtattttttaatggctaatgatattgaacatcttctcatatacttctttgccatcttgtgtgaaatgcttgagttcattactcatttttaattgggttggtggttttttgctgttgagttttgggagttcttatatatttttcccccctctgaatctgtagcttgtcttttttttctctagacagtgccattggcaaaggaaaagttttaaaatttgatgaagttcaacttgtcagttttttaatgagttgttttttgtgtcatttctaaaagctctttacctaatcccagattagaaaggtttccttctgctttttttctgaaagttttagagttttatgttacacatttaggtctaaaattcattataatttatctttttaaaaggtatgaggtttaaaaaagaggttcagtttttgcatatggataaccaccaattgttccaacactacttgttgaaaagattattctttcccattgagctgcctttgcacgtttatcaaagatcaagtggctatatttgcatgagtctatttctggattatattctgttccattgttctgtgtctatcattttgtcattaacacactttcttaattactgtagctttatcctaagtcttaaaattgggtagcgtatgcaatcctttcagttttattctttgtaaaaattaactattctaattccttttctcttccatatacattttagaatcagcttgcttttatctacaaaatgtcctgcagggattttgattgatactatgttaaatttatagattactttaggaagaattgatacctttactatgttgagttttctaatccatgaatgcagagttgctctgttaatttaggtctttgatttctttcattagtgtttcatagttctcaacacacagatcctttgtatgttttgttagattatacatatttcatttggggggagttataggaaataatattgcttttaaatgttgatttttaattgttttttgcatgtatatgaaatgtgattgatttttgtgttgaccctgtgtctaaactcacttattagttctaggagtatttgtgtagatttctctcaaattttctgcataattatgtcttctgtgaatatggacagtattatttttgtgtttcccaactatacacctttttttaatttatttattttcttgccttattgcattggctaagacttttagtacactgagtaggagtggtgagagtgcttgcctgttttccatcatgggcggaaagtatttcagattccaccattaagtatgttagctgtaaggtttttgtagatgcctttttaccaagttgaggatgttcttttgtattcctagtttgctaagagttttattatgaatctttattatgaacattattatgttgtatttagaaaaatcccttttctgtatctactcatgtcattatgtgatttttcttttttgactgttagtataatggattacattgattgacttttttcaaatatataactagcctttcattctgaggataaaccacttggttgtagtgtattatgctttttaaaaaataacaattttaaatgatgaacttcagcttttaaaagtgtacaattcagtgtttagcatattcacaaagttacacaactgtcaccactatctaattccaaaatatttgcattggcccaaaaggaaactctgtacctattaacaatcactacccattcttcctactctctagcccctggaaactacaaatcaactttctgtcactatggatttgcctattctgggcattcatataaatgaaatcatacaatatttggtcttttgtgtctggcttctttcatctagcataatgttttcatggcttattcatgtcatagcatgactgtaacatggctcagtactttattcccaaaaattccattgtatggatattctactttgtgtatctgttcattagttgacagacatttgagtaatttgcactttgggactattatgaataatgctatgaatatttgtgtgaaagtttttgtgtggacacatagtttcagttctcttgggtatatacagaggagtggaattactgactcatatagtaattctgtgtttacctttttgaggaactccaaactcttttccaaagggcagcactattttacattcccactagcagtatgtgagggttccagtctctccacatccttgccaacactttattgtctgtctttttcattacagctgttttaattggtgtgaagttgtatgtcatggtggttttgattttcatctccctaatgggtactgatgttgaggttcttctcatatgtttattggccttttgtgtttatactctgaagaaatgtctattcaaatcttttgcccatttcttaattggttagagtatctgtctttgttgttgagttgtaagagttctttaaaaattgtggttattaaccccgttatctgatatatgattttcaaatattgtatcctgttttgtagtttgttcttttactttcttaatggtgttctttgaggcacaagtgttttcaattttgagacagtccagtttacctagtttttgttacttgtgtctttgatattatatctaagaatccatttgctaacccaaggtcataggggtttactctggtgtggttttttaattcccctaagagttttataattttgctgttatatataggtttctgatccattttgacctgttttttgcatatgatgtgaggtaggggtcaaattcattcttttgcacatggtttcctttgttccagcattatttgttgaaaaaaccagtctttctcccatttaatcctcctggcacccttgttgaaaatcaactggctgaaattaatgagagtttacctctcagatctgtattttatgacctatattgtctatccctatgctagtaccacactgtcttcattagtgtcgctttgtagtaagttttgaaatcagaaagtgtgagtattccaatttgttttcatttttcaagattgtttttgctattctggatttcttgaattttcatatgaattttaggattagtttatcaatttctaggcacaggggaaggtagctaggattttgatagggattgcatggaatctgtagagcatatttgtcaagaattgtcttaccaatcttaatccttctgactgataaacatgggatatgtcttttgattcatgtagattttaatctctttcaataatgttttgttgttaaactattttattccttttcatgctattgtaagtggaattgttttcttagttttcagattatcattgttggtgcatatgaatatactttttcttgtatcctatgacttgttgaacttactagctctaataagtttttgtttctgtgaataccttatgatttttcatatacaaaattttatcatatgcaaatagggatggttttacttcttcctttctgatttggtttggctgcatccccaccaaatctccacttgaattgtatctcccagaattccctcgtgttatgggaggtacccgggggaggtcattaaatcatggggggccagtctttcccgtgctattctcgtgatagtgagtaagtctcctgagatctgatgtgtttatgaggggtttccacttttggttcgtcctcattttttcttgctgctgccatgtaagaagtgccttttgcctcccgccatgattctgaggtctccacagccatgtggaactaaatccaattaaacctctttttcttcccagtctcaggtgtgtctttatcagcagcatgaaaacagactaatacaccttccaatctaaatggctttttttccttacctaattctcctggccaaaacctctggtatggtgttgaatggaagtggcaagagtggatatccttgtttttatttgtaaacacctttaattttcctgctctcttaccactttttttgtcctgtcatttttgttttttttttaaataaaatgacatttattacggattttgtaatcagtatataattatatatttacattttgctttacatacataagatcacagccaaggaggttacccataatttcacattttatcaccagccgcttgtgctattttatatttgaaaatattcactcttattatttacatcaaacagtgatctataactttgtttaaacaataataattaagggccttttcttctttgggacaataaaaaattaaataacgtattgaagatactactaaggaaactctactttttgattatggcctctgcattaaagagctgtaggaatttttctaattgtcagatcttcccacaacctctctgttcaaagaaataacatctttgaaataatttgtgtgagtactttacaaatcacaagttgattcacaagaccatattaccataatcactaatttttaaaagtctcctaaatattttgtatatcacttctcttgattataaaatgtcaatagtatggacacactcttaatataacagaatattaaatcaatttcctatcaacccaccaaaggcatttagtaattgtattggccatttccactgattggcaggaggctcttcccctaaggctcccatggttttcactgcgtcattttcctcaccagacttagttaatcttcaacctgaggaatcacctcttctacttgatcaccttaatgttggtctcctaattttttaacatctggttctactttaactatagccagcttctcatttgtaatctgttctgtatactttctatgtgctgcattttcagggatttgctcaagaacatcaagaatctttgtgtacaatattctcagcctctcttatggactcttgcatatagccaatcccacaaggccagtggtcttcagcacacccactatgacagtgccaacaagccaatgacctgccattttttttgaagtctttaatcaggctgaattttattttgctgcgtcctctccctctccccgcatctccccctctccccgtcgccccctctccctctctctccctgccccagcctttctccccctccgtctttccattcttcccccacaaccaagtaacatgtatggggtgtgtgtgtgtgtattttttttttttttgagatggagtcttgctctgtcgctgaggctggagtgcagtggtgcgatctcggttcactgcaagctctgcctcccgagttcacgccactctcctgcctcagcctcccgagtagctgggactacaggcgcccaccaccacacctggctaatttttttgtatttttagtaaagacggagtttcaccgtgttagccagggtggtcttgatctcctgacctcgttgatccacccgccttggcctcccaaagtgctgggattacaggcgtgagccaccgcgcccggcctgggttgtatatatttttatgggtacacagctaaaactgttttttttattttgccctcacgtttgagtaatggtttggctggatatggaattccaggcttcaatattttctttcagaattctgtgtatgttattttatccttttgtaacttttacgttaaacattttggttctcataccaaagagttgtcctcttagaagcttgtaatttcctatttctatttggagtttacagttttcacaagtatgtgtctgtgagtttacagttttcacagtcattattaccgtttgctatttggcggaccattttatctgagcatatcgatattattctaaaatacttattgtgtgtatatgtctagttgtgtggatatatgcacacatatgtatttattatggatatgtgtgcacatatatatgtctacacttgtatatgtgttttaaatccattttatcctgaaggtttcatccatttagaactattaagtgaatattatattacacttaatagaagtacctagcttttttttgtctcttaggttttaatatccttatctttttattctataatttaaagattcttcagtttagtcttctaaattataatttgtctgtaatacgtctatttatgattttttttttttctttgacagagtctcactctgttacccaggctggagtgcagtggtgcgatctaggctcactgcaacctcgacttcccaggttcaagtgattcttctgcctcagcctccctagtagctgggactacaggcgtgtgccaccatgcccagctaatttttggatttttttggtagagatagggtttcaccgtgttggcaaggctggcctcaaactcctgacctcaagtgatctgcccgcctcggcctcccaaagtgctggaattacaggtgtgagccactgcacccagcctaattttcttttttttttcataatgatagttttgtttttttagttagctatgcggtgctgatttgtgtctttcttatctcccctgattactccctccctgccctgtcccctactctcatccctacacctgagaatataagaattgtaggtcctttcctcagaaagtaatgcccctgcgcacattcacagaaaattttgtacataatgcgcgattctagaatgtctaaaagctcatttatgacctctagatccttgcttttcaaagtgctcttatagaaacagctacattggtcctgtctggtagctggttagaaatgctgaatctcagggcctgtgccagataccaaattggaatcttcattttaacagatcccttgtgatttatttgatattcaggtttgagaagcattgctgtaggaggttagaaacttctgtgatgtatgtgatatatattcttttcctgttgtgttaccttttacatatctggagtatcatctacagcacttttaaaaaaaaatcatgacttgatcaccaaaattgtaaagtagaaatattttgaagtagttacaatatagtatagtatctgaatagcaagctatgctatatgaagtagcaggaggcaagcagggactgatgtatacactcattcttgtaacaatagcaaacagttacatagtagttactatgagccaggcagcattctaatcattgtgtttttgtttatgtatatgtgtttgtatatatgtgtcttagtccatttggagcactgtaacaaaataccatagactgagtggcttataaagaatagaaatttctcacagttctggcggctgggaagtccagcatcgaggcactggcagatttgatgtctggtaagggctcactttctgattcatagacaatgtctttttgctgtgtcctcacatggcaaaagaggctagctagttctctggggtcccttttataaggacactaatcccattcttgaggacagagccctcatgacgtaatcacctcatgaggtacaaagactccacctcctaatactataaccttaggagttaggatttcaaccatatgaatttggggaaggatacaaatattcagactctgcgaatgtatgtatgtatatgtatttatttacacagattcatttgcttatcatttgttaataatgatatataatgacatatcattattaacaaatatataatatagtaagacagacctaagtttggatattagttgtatgtcttagttgtgtccttgagcaacttatttaccatatctgaagtttagtttcttcatttgtaaactggagacaatatgtacctcaaatatttgttctaataactaagtaaattaaaatttgggaaagtacattaatttggttatcatttgttaagcaaatgaatctgtgtaaataaatacatatacatacatcagcttcgatactatttccattttacaaataaggaagctgaggaacaaaaaggttaagtatcttagccaaggtcacgtaattagtaaatggaagatctaggatttgaaccaagatagcataacctaaaatctgtgctcttaaccattacactatattgttcttttatagttgtacttggagatctccgtaaacaaaatgcagctcaaaagcaagctgattaattccttatacatttaccttttaaaatttattactagaactcatctgcttgtggtgctgatagatgagccagacatgccagatcattaattctttctgaattacttttggtttgctattaattgagatttctaaatggcaagaagctagattattggattttacactacctaccctcaaggtttgaaataaggttattaaataacttatgcaaatactttctacattaaatgttaattttctcccatctccagtagatggacaaaagacaatttatagaaacagtaattggatggctaataaaattagaacaaagattaacttcaaaagcagtcagagaaatacaaataccacgtgttaatttagtaaatatataaaaatgaaactgttttatcaaatattcaataaagacataaaaataaaatgtgattagtgtttaatgaaatgagcattcatacttgataagtagaaatgttgatctttgctgatgggtttgttggtattatttgacatatcatggccttcttttccttatcactttttttcataaactatttcctaattttgaacattaaattgtttgcagttttggtcacataatgctgtaattaacatgcttttatctttgtttgaatgtttattatggtttataaaagtagaattactaggtcaaaggttggagtgttttccaggctctcattaaaaataatacctaatttgtattgaatgcttaccatgtgtagtcattgctctaaatgctttacatatgtatgaactcatttaatctttacatcaaaaatataagatgggccctattttaactctgttttacaggaaactgagccacagtggaattaaaataattttcttaaagtcacacagttagagccaggatttgttttccagaaagattatactactttacgcttctgctcgtagaatttgagattatataccctcttaagacctctgcagtaaaatgttgtgataattgcacaatagcagtgagcacaactagaacctctaaattatggtctctaaataccattcctcactgaaaggatccaagggtcattggatgaatgactgatttccattctagggcagaaagtacaagcgaaaccagggatgttctcttgtatcagaaagcaaggaagctaccaaagactagtagttccagccaaaaggacacaatggccaataaaaaggggactcccagtgaccaaaagatgagagaacttgaacatgatgaaagaatataacgaaggcagttggttgaaatgtactgaatttataaaaactccttggtttataacaatagatgtgtaataaggaacacaaatacacaccaccactacaacaacagtgaattactggatacagtaaaaacaaataggcactaactccatactctgataacaagcaattatgaagaaagagggaaacttctttgcagaatttttgttaatgaatgtggaagtaatgacaggattagaatatcattttgccaaccctaatgaaatgatttattcaggctgtgatcatcagtggatgaaagcattagacatatggtcatgtgagaacttctcaatggaggaatcagtctgccctacctggacctattgcttaatctgagtcttatgaaaagtagggtaaggagacagtgtatgtcttcttctgtcatacgtatgaaacatacagcataagctctgaagttttccagccaaaaatgttgagcctgtgtcaaattaagatcaagcttctgtagcagggtttggcaaaacacggcctttcagtcaaattctacctaatgactgttttcaaataacgttgttttgttttgttttttaaacacagccactctgaataatttacatattgtctgtagctgcttttgtgctgcagtgacagagttgagtagttgcaacagaaaccgtatggcccacagagcctaaaatatactagcttgtcctttcacagaaaaggcttcctgatccttgagctagatgaaccaaagttaagtgacatcagaaagaagcaacaccacaaaatatgggccttctacgggacagctgatgtggcttctttaactagtcagtggtatggaaaatgagggagtatcactctaggctaagagagacttaagcgcaacaaccaaatgaaatctcgagactgttttgatcctgcttcaaataagcaaactgaaaaaacaggagacaaccaggaaaatctgattattgcctggctatattaaatgtcatcaagatttattatgaattttaagtagtagcattatagatagctggataacatattttgagagatatgtatgttgaagtatatggaggtaaaatgatatgtggcatttgcttcaacatacttcacaaaaagaaaaatacagcaaagacaaattgatctcaagattctttgatgtcaaggctcatatactttatactgtatcatcatgccatcattactatctatggtaggttttagtgttgcctcctaggttgctgtgcacaacagctaccaacctctcttttaaatgccctaattccttggtttctttgtcaatgtaagcacaccgttgtgtgcttactcctgtttccactatatctaagcacgattgacagagggacatccatcaagactggatctgtatcttctggtcttggtggtagaagagcctcatatttgatacttgattctgttcttcagtaactgtgagatttagtcctgacaggttaattttttagtctcaacatcctgggcctttaaagggggaatatcagttactcctggaattgtttcaaaattaaaggatacgtttgttctgtaaataatgaaattattaacccaaatgagacccataaatattttggaaggtatagtgagggaattgatgcatgatctttataataagacagacctaagtttctatattagttgtatgtcttagtcgtgtccttgagcaagttatttacttatctgaagtttagtttcttcattggtaaactggagacaatatctacctcaaatatttgttctaataactaagtaaattaaaatttgggaaagtacatagtatagcaacagatacatgctaattaaatattttttcttttttttcatttggggaaatatacctgtatagtgtagctagacatatttacaatggataacttaaaaaactttttttgaatatcaaatggtatgattaacaagaattatgcagaacttatgtgaagaaaattcctgtaacataaagaggatactaaatagagagatatccttttttttggataggcatgtacaatattgttaagaggtcctttctctctaaactatttttttttaattaaaaaagtttttatttcaataggcttttggggaacagatggtgtttggttacatgaataagttgtttagtggtgatttctgggattttggtgcacccgtcccaagcagtgtatgctatgccaaattacccagtgtgtagtcttttatcgctcacccctcctcactcttttcccccgagtccccaaagtccattgtatcattcttatgcctttgagccctcatagcttagctcccatttatgaatgagaacataaaatgtttgatttctccattcctgagttacttcacatagaataatggtctctaattccatccaggttgctgcaaatgccattattttgttcttttttatggctgagtagtattccatggtatatgtataccacattttctttatccacttgttgattgatgggactttgcactggttcctcatttttgcaattgtgaattgtactgctataaatatgcatgtgcaagtatctttttcatatgacttcttttcctctgggtagatacctagtagtgggattgctgtatcaaatggtagatctacttgtagttctttaagtaatctccacacagttttccatagtgcttgtactagtttacattcccactggcaatgtaaaagtgttccctgttcaccacattccatgccaatatctgttattttatgatttcttgattatggccactcttgcaggagtaaggtggtactgcattgtggttttgatttgcatttccctgatcattagtgatgttgagcatttttttcatgtttattggccatttgtatatcttctttaaagaattgtttattcatgtccttagcagacttttcaataggattatttgtttttttttttcttactgctctgagttccttgtagattctagatattagtcctttgttggatgcatagttagggaagattttgtcccactctgtgggttgtctgtttactctgctgattatttcttttgctttgcagaagctttttagtttaattaagtcccatctatttgtctttgtttttgtggcatttgcttttgggttctttgccatgaagtctttgcctaagccagtgtctggaagggtttttcaaatgttatcttctagaatttttatggtttcaggtcttagatttaagtccttgatccatgttgagttgatttttgcataaaatgaaagatgaggatccagtttcattcttctacatgtgacctcccaattatcccagcatcatttgttgaatagagtgtgctttccccacttcatacatgtttttgtttgctttgtcaaagatcaattgactgtaagtgttgggctttatttctgggttctctattgtgttccattggtctacgtgcctttttgtttgtttgtttctgtttttttttgtttgtttgtttttgatgaagtcttactctgtcacacaagctggagtgcagtggtgtgatctcaattcactgcagccttcgcctctggggttcaaacaattcttctgcctcagcctcctgagtagctgggactacaggtgtgcaccaccactcctggctaatttttgtatatttagtagagacagggtttcaccatgttggccaggctggtcttgaacttctgacctcaagtgatcctcccgctttggcctcccagagtggtgggattacaggagtgaaccactgcgctaggcctatatgcctacttttatatcagtaccatgctgttttggtgactgtagccttacagtatagtttgaagtcaggtcatgtgatgcctctagatttgttctttttgcttagtcttgctttggctatgtgagctcttttttggtttcatatgaattttaggattattttttctagttctgtgaaaaatgatggtggtattttgatgggaattgctttgaatttgtagactgcttttggcagtatggtcattttcacaatgttgattatacctatccatgagcatgggatgtgtttccttttgtttgtgtggtctgtgatttctttcagcagtgttttgtagttttccttgtagaggtctttcacctccttggttaggtatattcctaattttttttttttttagctattgcaaattgggtccttgatttaattatcagcctggttactgttggtgtatagtggtgctactgatttgtgtagattaaatttgtatcctgaaactttcctgaattcatttatcagttctaggagctttcgggatgaatttttagggttttctgggtatgggattatatcattggcaaacagcgacagtttgactccctttttaccaatttggatgccctttgtctcttgtctgattgctctggctaagacttccagtactatgttgaatagaagtggtgaaagtgggcatccttgaatagaagtagtcaaagtgcgcaatcttgttcctgttctcaggggaaatgctttcaactttccccgttcagtataatgttggctatgggtttgtcatagatggcttttattgccttaatgtatgtaccttctatgttgattccactgcgggttttaattataaagggatgctgtattttgtcaaatgctttttctgtgtctattgagatgattgtgatttttgtttttaatttttgtttatgtggtgtattacatttattgacttgtgtatgttaaactatttctgcatttctgatatgaaacccacttgatcatggtgggttatctttttatatgctattggatttggttagctggtattttgttgggggtttttgtatctgtggtcatcagggatattggtctgtagttttctttgttatgtccttccctggttttgttattagggtgatgctggtggcttcatagaatgatgtagggaagattccttctttctctatctttggaatagtgttaatgggattggtaccaattcttctttgaatgtgtgatagaattcagctgtgaatccgtctggtcttggacttttttttgtgaacaattttttaattatttcagccttgctgcttgttattgatctgttcagagtttctgtttcctcctatttttcaggaatttattcatcttctctaggttttctcatttgtgtgcataaaggtgtttgtagtagccttgaatgatcttttgtatttctgtgatatcagttgtaatatctcccatttcatttctaattaagcttatttggatcttctctcttcttgcttaatctcactgatggtctgttaattttatttatcttttcaaagaaccagctttttgtttatatatattttgtattgtttttatttgtttcaaattcatttagttctgctctgatctttgtttcttttcttctgctgggtttgttcttgtttctctagttccttgagatgtgaccttaagttgtctatttgtgttctttcagactttttgatgtaggcagttaatgttatgaattttcctcatagcactgcttttgctgtattccagaggttttgataggttgtgtcactattgtgccattcaaataatttttaaatttccatcttgatttcattgttgacccaattatcattcaggaacaggttatttaatttccatccatttgcatgggtttgaggattccttttggagttgatttccaattttattccactgtagtctaaaagagaacttgatgtaatttttattttcttaaatttattgagactcgtttgtggcctttcatttggtctatcttggagactgttcatgtgctgatgaatagaatgtatattctacagttgttgggtggaatatcctgtaaatatctgttaagtccatttgttttagggtatagttgaagtccattgtttctttgttgactttctgtcttgatgacctatctagtgctgtcagtagagtattgaagtctgccactaatattgtgttgctctctatctcatttcttaggtctattagtaattgttttgtaaatttgagagctccagtgttaggtgcatatatatttaggattgtgatattttcctttggactagtccttttatcattatataatgtccctctttgtgtttttatttatttatttcttttttactgttgttgctttcaagtttatgttgtctgatataagaatagccatttctgctcacttttggtctccatttgcatggaatatctttgtgagtgtttatgtttcagatgagtctcttgcagacagcagatacgtggttggcgaattcttatctattctggcattttatgtcttctaagtggaggatttaggccatttaccttcgatgttggtattgaaatgcgaggtactattcttttcatcatgctatttgttgcctgaataccttgtttgttttcattgtgttatttttcattgtgttatttcattgtgtttcattgtgatatttcattgtgttttataggtcctttgagatgtatggtttaaggaggttttattttggtatatttcaaggattggtttcaagatttagagctccttttaacagttcttgtagtgttcacttggtagtggcaaattctctcagcatttgtttatctaaaaaaggctgtatctttcatttatgaagcttagttttgctggatacagaattcttggctgatagttgttttgtttaaggaggctaaagataggaccccaatcccttctagcttgtaaggtttctgctgagaaatctgctgttaatctgataggttttactttataggttacctgatgcttttgcctcacagcccttagaattctttccttcatcttgactttagataacctgatgactgtgtgcctaggtgatgatctttttatgatgaatcacctgagtgttctttgagctttgtatttcaacgtctagatctctagcaaagtcagggaagttttccttgattattccctcagatatgttttccaaactttcagatttctattcttcctcaggaacaccgattatccttaggtttggtcatttaacataatcccaaatttcttggagtctttgttcattttatttttaattcttttttccttgtttatatcagattggattaatttgaaagccttgtcttcaagctctgaagttttttcttctacttgttctgttgtttcaattttccaatgtattttccatttctctaagtgtgcccttcatctccagaagttgtgattgttttttatttatgctatctatttatctggagatttttctggccatatcctgtaacatttaaaaaaaaaatcttaaagttggtattcacctttctctgatgcctctttgagtagcttaataatcgaccatctgaattctttttctggcaagtcagagatttcttcttggtttggatccattgctggtgagctagtgtgatcttttgggggtgttaaagaactttgttttgttatagtgccagaattttttttctggttctttctaatttggatagactatgtcagagggaagatctcgggctcaagggctgctgctcagagtcatttttcccatgggttgctcccttgatgtggtgttctctcccttcccgtagtattcctgagaggtgaactgcagtgattcttgtttcatttgtgggtctagccacccagcagagctaccaggctctggcctggtactggggagtgtctgcaataagtcctgagatgtgatccatcttcaggtctctcagctatggataccagcatctttccagtgaacataacatgggagtgaagtggactctgtgagggtccttgattgtatttttgtttagtgcactggttttttgtttgttggcctccagccaggaggtggcactttcaagagagcatcagctgtggtagtgtaaggaggatacaagcttgccctaaggtcacctggataaggtttctcaggcagtgggtgggaccacagagctcccaagagattatgtcctttgttttttggctaccaggcaggtagaaaaagatcatcaggtgggggcagggttaggtgtggccgagctcaaactctccttgggcaaggcttgctgcagctgctgtggggaatgaaggtgtagttctcaagccaatggagttacgtacccaggaggattatggctgcctctgctgtatcatacaggtcgccagggaagtgggggaaagccagcaatgacaggccttacccagctcccatgcagcctgaaaggccggtttcactcccaccgtgcttctccaacagcaccaagtttatttccaggcagccggtgagcaaggctgagaacttggcccagtctacaaacttccctgctgagaaagcaagcagggctttcaggtttcatgcctctgcccctgccaagacttctgtgcatgtatctgcactccccattttccccctcccccggattctgtccagtaaacttcacattcagttgaaattgttacaaagttcaactggaagtttccttctccctgtggttttttgccagtttcactggcagccctccccaaggacccctggaagacaaagtcagaaatggcttccctgtggacctagagtgcccacagggctcttcccactgcttcctgtacccctatatttcactcagctttctaaattaatctcagctccaggtaaggtcaagttcttttcccatgatctggaccagtgaggatgtgcatttaggggcaaacgttcccccctcacactttgggcactcacagtttttggctatctcacagagcctgcagcagcaagcagcttcattcaaaggatctgtggattctctaggctttcttggtatgtttctgtggtagttcttggagcaaaagttcatgacatgggtctccacacactgctctgtctgtctgagtgggagctgcaagttagtcctgcctcctgtgcaccattttttttcttacattggataacttttatcaattatgtgaaaaaggataattctctgcttcacatgtgatatttctgtagaaaaatgccaagctgacaggttaactggaagatagtactttaaggttccatgaaagagtaggtaagctatgagatgacttaagtagaagtaagtgaaaagttagctatttgctgagagaaaaaaaaaattgtatttttagtagagaaggggtttccccatgttggtcaggctggtctcgaactcccaacctcagatgatctgcccgcctcggcctcccaaagtgctgggattacaggcatgaaccaccacgcccggcaaaaaaaaaaaaacaacaaaaaaaagacatatttatacatttattagattgatgggctataagctgttaagaacccaggagtcactgaagatcaaaaatggtaaatttaaaaaatgccattttcttggtatccccatccccaacaagttctaaagctaatgcagagcaaagtcccttacaatctaaagactgaagctgctcaaaatgtaaaatatttgatagtcatttaccaaacattttgaaagacagtgataataaatttctctctaattcaagggaatagttgggtttgaaatcttccacttgtggctttctgacttcgttcactcgtggaagaatgcctagctttctctttatacattctttatccttttccttctctcctcttacttacagtatcatatgaaaccaaattgttaattatgcagaggatgtttcatgcctaattccaaaatctgataatttttattcattaaaacaacaaacatttactgagatctcactgtgtcataaattgggagatggttgctggggaatagcaaggcagggagaaagagagtaagaaagaaaaggaaggagagaagaaagaaggggagaaggactttctttgccctgaggtagtcaacatttagtgtggaagactagcagttaaaatgtggtacatatgtatatggaatactacacagccataaagaacaaaatcatgacttttgcagcaacatgaatgcagctggaggccataatcgtaagaggattagcacaggaacagaaaaccaaatatcgcatattctcacgtttaagtgggagctaaacattcacagacgtaaagatgggaacagtagacactggggactactagaggtaggagggagagggatgtgggttaaaaaactacctgttgggtactatgctcactatctgggtgataggatctatactccaaacctcagcatcacacaatctacccatgtaacaaacctgcacatatacccccagtatctaaaagttgaaattatttttaaatattgataaccccaaaatatgatgaggattgtggtagtaatatgcttataactcaatacgtactaatacaatgtactatgtgagcatcaaggaggacccctaactcatcctaaggtagacagaattgtatttcctgaactgggttgaaggagttagagagtaaccagtggcaatgcactcaacttttccatgcaaagggtacatcatattcaacaatggcaaaatttcagaaactgtatgtattttagtagtgctgaatccaaaatatataagtacaaggtaaaggcagaaaaggagtagcaaaatttaagggatggagagatagaagagccagattatggtgagccttagagactcttaacacatggaaggaattgaactagttacagttttataagctgaaggttaatgtcagatgtacctttaaaaaagatctctggtagcattgcaaagaatgatagaggattcatgagagaatagtgcaaaaaggatcaaagagttgtgagaccaaaagtaggaaaaccagtttgcaagctaattcatttatttatacattcagcaaatattcattgactgtctaatatgaaccaggcactattctgtgttctgcccctttgaagcttatatttaatgcagtaagaaggaaagaaatatcaaagacatggaataaagaaatagcaggagggttggaaagaactgagaacttaatatatagtgcatgaagggaaggaaggaaggaacgataaggaagaaactgaaatgacttccaggttcctacttgaacaactgggagatgctggtgtcattcaccaaggtaaggaatataagaggaagagcagactgagggtagataagagtttagtctcacacctacctagtttgagatacctaggacattaaggcaaaactgtacagtagaaagttaaaagacagtatttattgtaaaaattggactaacacctccttcataaggtgattgtgaaattaaatgtactgaaacgtggaaattccttagaccatcatttggtacatagtacatacgttagctgctattattatttcaagattatgggctttgagctagacaaatttgcttaaatactggtagcaccacttgccacttttgttaccttgaacaagtctcttctttgagtctttttttctgcatgtaaaactggaatagtatctattttagaggggtgctgtaagaattagtaatgatgtatgaaaagtaccgactacagtgactggcacagtataagtgctcagtgactactgggagtcaaataaaaaaattgcagtttaggagaaagttcagattaggggttgaaatttgggatctatcaatatggagtacttgaacctttgaacatgtatgctgagaacagactttctagaaagggaaaggataatatgccaaaagatccctgaatagttggaaagagaggcgatttactaagaatagtggttgaggaagtttgttggaaacttgacgcaaataatggagggctgatagagttttcaagggcattggagatagagctgagtcaattatttaaaggttattcaatagcattgagtatccagatgaattgaaaccatgaatttacagtgatactgttctttgtagttatatggttttctccaactttaagaaaagtggaggccgggctcgggggctcacgcctgtaatcccaacactttgggaggccgaggcgggcggatcatgaggtcaggagatcgagaccatcctggctaacacggtgaaaccccatctctactaaaaatacaaaaaattagccaggtgtggtggcaggcgcctgtagtcccagctactcgggaggctgaggcaggagaatggcatgaacccgggaggcagagcttgcggtgagccgagatcgtaccactacactccagcctgggcgacagagcaagactctgtctcaaaaaaaaaaaaaaaaaaaaagtggattcagagttgatgttttttaggataaagtgttttctaagtaggtcattggtatccgtttccacatgagcttcagatgtgctaggggtaaaagctagattgaggagggttcaggagtaaatgataggtaaggaagctctattaatcagtatagattcttctttcaaaaactttggctgagaaagaccaaaataggaaaatgtaaggaaggaggtgcactggcaagaaagtagtggttttgcttttgttttttaatggacaggaattacttgaatgtatatttaagaggaaacaagggaaccaaaagagaggaaagaaaggtctgaagttgaagcaaagagatgggctaatgaatgactccaggatccagagtgaccttagacctagtatgtccttgacactcattgtaaagcctctgataaacttgagattcatatttatttatttatttatttatttttgacggagttttgctcttgttgtccaggctggagtgcaatggcgcagtctcagctctctacagcctcctgaattcaagcgattctcttgcctcagcctcctgagtagctgggattacaggcatgcaccaccacacccagccagttttgcatttttagtagagacggggtttctccatgttggtcaggctggtctcgaactcccaacctcaagtgatccgcctgcctcccaaagtactgggattacaggcgtgagccactgcacccatattaattatataataattatataattaatttaattatataataattatataattaatttaattatataattctatattatatacaaaatataatatagaattataattctatatcatatacaaaatataacatagaattatatattagatacaaaatataatatagaattatatattagatacaaaatataatatagaattatatattagatacaaaatataatataatatagaattatatattttaattattaatatataatatatttatataatatatattatatatttatataatatatttatataatatatattatattttatataatatatattatatattatatatgatatattaatataatatatatcatatattaatataatatatatcgtatattaatataaatatatcatatattaatataaatatatcatatattaatataaatatatcatatatttatatatatattatatattatattatatataataattattaatatataatataattataattatatattatatacaaaatataatataacagaattatatacaaaatataatataacagaattatatattatatacaaaatataatataacagaattatatattatatacaaaatataatataacagaattatatattatatacaaaatataacaattatatattatatacaaaatataacaatggtatatacaaaatataacattgaattgtatattatatacaaaatataacagaattgtatattatatacaaaatgtaatataacagaattgtatattatatacaaaatataacagaattatatattatatacaaagtatatagaattatatataatatataattatatattatatacaaaatataatatagaattatatattatatatgattatatattatatacaaaatataacataatatagaattatatataatatatgattttatattatacaaaatataatatagaattatattatattttaattattaatatatatttattatatattaatatattatatattaataattattatatattatatattaatatataataattattaatatataatatgtaattatatattatatacaaaatataacaattatatattatatacaaaatataatataacagaattatatattgtatacaaaatataacagaattatatattatatacaaaatataacagaattgtatattatatacaaaatataacagaattgtatattatatacaaaatataacagaattgtatattatatacaaaatataacagaattgtatattatatacaaaatataacagaattgtatattatatacaaaatatgatataacagaattgtatattatgtacaaaatatgatataacagaattgtatattatatacaaaatataacagaattgtatattatatacaaaatatgatataacatagaattgtatattatatacaaagtatgatataacatagaattgtatattatatacaaagtatgatataacagaattatatattatatacaaactatgatatagaattgtatattgtatacaaagtatgatataatatagaattgtatattatttataattatatattatatacagaatatataattatatattatatacaaaatgtatagaattatatatgatatataattatatattatatacaaaatataatatataattatatataattatataatatatataataataattataagaagaataattataagaagaataattataagaatgaagagggcctgggatcagtctccgaatgacaggggaaggtagtgggcactgggcacctaaaaatggcatgcctcttctaaaagaggtcagccacagatccagctcagtaagtatgtatgcagaaatagatgtacacagatactaattttttttcaaaagaagccccgaaattcagtatttttaggtgaaaactcaatttttaatgttggagttgggtaaatctggatttgagtctgtctctgccacttactagctatagaattgtctaagttaattgtatgagaaaacctgagtgagttttcgcatccataatgtggggacgatggaatctattcttacaactttagaaggtagatttaataatacatcatgaattcgtacaatgtgtaatgtttattaaatgttgactgtgattagtggttgtccagctttaaaggtgtgggagcgggattgattacaagggaacatcagagagcttttttgggttatggaaatgttttgtgtcttgattgtagtgttggttgcttgactggacatatttgttcgcacttatcaaacccttgaagttgatggattttttgcatataagttatacctcaacaaagctgattttataaagataactgcctttcccttttctgtgtactccagttacatcaactgttaataaaatagagttgataccaaaggtttctaacatttttatcgctagtctcttactgtcccctctgagccccagttacaagccccacagtgtgaaagatcttgcccactgggaaacaagaaagaaaaaactacctttattagtccaatatactcttctcctatactgtgcaaaccatgtactggatttatcaatttgggtactgtgcttgatacataatatgagtaaagcaggtcacttagttactttgcagaagtgttataatataatctacaagctaattacccactgtttagtaataagctataaaacttaataaaccaagaagaaaaattagaagcataagtaatatacaggcatacatcagagatatggtttggttccagacctccacaataaagtgaatgtcacaataaagtgagtcacgtgtattttttggttttccagtgcatataaaagttatgtttatactatactgtagtctgttaagtatgcaatgacatatctaaaaaatatatataccttaatttaaaaatattttattgcttcgaaattctaatgatcatctgagcctttaacaagttacaattcttctcttggttaaaggtcttgcctcagtgttgatggctgctgactgtcagggtagtggttgttgaagattgcagtagctgtagcaatttcttaaaataagacagcaatgaagtttgtcacatcagaaaccttcataaaagctttctctgtagcatgtgatgctgtttgatagccttttgcccacagtagaatgtctttcaaaataggggtcagtcttttcaaaccctgctgctgctttatcaactaagtttatgtaatattctaaatcttttgttgtcattccaacaatgttgacagcatcttccctaggaatagattgcatctgaagaaaccactttctttgctgatccctaaaaaacaactcctcatccattaaagttttctctggagattgtagcaattcagtcacatattcaggctctacttctaattctagttctgttgcgatttccaccacgtctgcagtttcttcctccactgaagccttgaaacacctcagaggtcatacatgagggttggaatcaacttcatccaagctcctgttaggttacagttcattgacctccaatggaatcatgaatgttcttaatgacatctagaatggtgaatccttttgagaggtttcaatttactttgcctggatcccatcagaggactcgctgtggcagccatagccttacaaaatgtgtttcctaaataataggcttgaaagttgaaattactcctgattcatgggcagcagagtggatgttgtgttagcaggcatggaaatatgtggatttccttatatatctccatcagcgctattgggtgaccaggtgaattgccagcaagcaggaatattttgaaaggaatctttttttctgagcggatggtctcaagagtgggcttaaaatattcagtaaacaatgctgtaaacagatgtttacaatgtgctgtcacccaggctttgttcaagcagagcagatttagcttaattcctaagggccctaggatttttggaatggtaaataatcattagcttcaacttaaagtcacgagctgcattagcctgcaacaggagagtcagcttgtcctttgaagctttgaagccaggcattgatatcttctctctcgctaggaaaagtcctagatgacatcttcttccaatagaaggctgtttcatctacattgagaatctgttgcctcgtgtagccaccttcattagtgatcttagctagatcttctagataacttgcagcagtgtctccatcagtacttacagcctcaccttgcacttttatgttatgtagagtgcttctgtccttaaacatcatgaaccaacctctgctagattccaacttttcttttgaagccgcctcacctctctcagccttcgtagaattgaagtgttctgtgtgccttgctctgtgttaggctttggcttaaggcgatgttgtggctggtttgatcttctttccagaccatcaaaactttctctctatcaacagtaaggttgttttgctttcttatcatttgtgttttcactggagttgcacttttaatttcttttagaaactttttcttttgcatacacaacttgactaactctttagctttcagctagaccttccttaattaataaaggccttccttactaatcttcatttttgttgttgttgttttgttttgttttgagatggagtgtcactttgtcgcccaggcttgtgtgcagtggcgagatctcggctcactgcaacctccgcctcgcaggttcaggtgattctactgcctctccctcccaagtagctgagattacaggcatgcgccaccacgcctagctcatttttgtgttttcagtagaaacagggtttcaccatgttgtcaaggctggtcttgaactcctgacctcaggtgatccacccaccttggcctcccaaagtgctggaattacaggtgtgagccactgtgcccagcccatttatagcttttgatttaaagtgagaaatgtgtgagtgttccttttacctgaacacttagagatcattataaggttattaattggcctaatttcaatattgttgtgtctcagggaagagggaggcccgaggagagggagagacagcttgttgatggaacaatcagaacacacacagtattcgtcagttaagtttaccctcttttataggcacagttcatgttatggcacctcaaagcaattacagtcgtaacatcaaagatctcagatcacagatcaccatgacaaatacaatagtaatgaaaaagttttaaatattacaagaattgccaaaatgtgacaacagagacctaaagtgacctcattctcttggaaaaatggtactgatagacttgctctatgtagggatgccacaaacctccaatttggtaaacaaaacaacaacagaaaaacaacactgtatctgcaaagtatcataaagcaaagtgcaataaaaagagttagcctgtacttaagtatataaaagtttagttccttaaatgagaataaaatacctgagtaacagcactcagtgtctttgtgcatgcttctttgggtgtatgtgtatgtgtgtgtgtatatatatttatatatatatatatatatttgtgtgtgttctataaacacacgcaaatatgtctttcacaaacttttcctaacttcattctacctctgccactcttgagactgcaagacaaactccttctctaccacttcctcctcctcctctgcctactcaccatgaaaacagtaattcacttccacttaatgaacagtaaatacattttctattccttgtgattttcttaatgacatgttcttttctctagctaactttattgtaagaatacagtctgtaatacatgtaacatagaaaatatgtgttaatcaactgtttgtgttattggtaaggcctccagtcagcaataggctcctagaagttatgttttgggggaatcaaaagttatatgcagatttttgactgtgcagaagggttagcacccctaacccctgtgttgttcaggggtcaactgtataattataaattgtgaccaaagcacaagcatcaaaagaagacataggtaaattagactgtcctgaaaattaaaaacacttgtgcttcaaagggcactatcaagacactgaaaagtcagcttatagaatgggagaaaatatttgcaaattatgtatctaaccaagggatcaatatctacaatgtctaaagaactcttaaacaactcagcaataacagaaagacaatccagccaattaagaaatgggcaaaggatttgaaaggacgtttctccaaagaatagcataagtggctgttaagcacatgaaaagagccacattattactcattagggaagtgcagatcaaaaccataatgatatatcacttcacacccataggatggctaaaatgaaaaaggtggacaataacaaatgttgtcaaggatgtggagaaatggacccttatgtgttgctgatcagaatgtaaaatggtattgccatttggaatacagcttggcagttcctcagaaaggaaaacatagggataccatatgacccaccagttccactctctctacatactaaagataattgaaaacatatgtctatataaaaacttgtataccaatattcatagcaatgctattcacaaaaagtagaaactacctaaatgtctgtcacctagtgaatatgtaaacaaaatgtgatatatccagataatggaatattattcagccataaaaacaaatgaagtactgagtcatggtacaaggatgaatcatgaaaacataaggctaggtgaaagaagtcagacacaaaagaccacatattgtatgattccatttatttgaaatgaccagaataggcaaatccatacagacagaaaaactagattacctgttgctaggggatgtggggaagagaaaaaggggaataactgctgataggtacaaagttttttgaggcggtgatgaaaatgttcaggcattagatggtggtggtgatggttgtacaacttcctgaatatactaaaaaccacccattgtgcacttgaaaaaagatgaagttcgtgatataaaatatctttcaataaagctgttactgtaagaaatataggtgtgtaattttttttcctggcgttctgaattctttcaaactcatatttattcttgtgaaccacagtcataggtaggaacctttgaacttagtagtcctaaaattccttttccagtttatgttgtgagctcttttatcagtagctcaagctaattttagaatagagaaggtgattttcacctgtgtgaacactcactgagatgctcagcagtagggtgcataaagatctctgcatgttctttaagggatctgattcattctctgaatactaggagcatgtgcttgtttagtatttgtactttaaacaatatagtagttcgttgtcattatatccttatttccaagacatttcaaacataaaatcttactaacataatactacaggaagtctaaacatataaaaacactgaactcccaaaggtccattaagaatatggtttggccgggcgcggtggctcacgcctgtaatcccaggactttgggaggctgaggcgggtggatcatgaggtcaggagatcgagaccatcctggccaacatggtgaaaccccgtctctactaaaaatacaaaaattagctgggcgtgatggcacgtgcctgtaatcccagctattcgggaggctgaggcaggagaattgctttaaccagggagtcggagtttgcagtgagctgagatcgtgccacagcactctagcctagcgacagagcgagactctgtctcaacaacaacaacaaaagaatggggtttaaaaattataatgtatcttttcattaaaagtaatgttataaataattattactattattttaagtgggaaataggttcaaggctagttcatataaatacataatggatggccacaattaaaaagttacagaaataatacttttaggataccagtaattaaatcaatcaggaaaatatcttatttctcagggatttcataaccttttttacaaaagtaaacatctcattataggtatttgttagacattatggagcctttccttagaagaatgtactgaatttgtcatacacttgaaagggattcccaaaaatcttcatctagacctacatggggaaagtaggtatatgagtctatttggactaccataacaataccacagactgggtggtttaaacaacagaaatttgttttctctcagttctggaggctagaagtccaagatttaggtgttgtcagggttggtttctggtatggcctcttttcctagcatgcagtgtcctccttactgtgtcctcacatggcctcttctcttactgtgtcctcatatagtatgtgtggacagagatctctggtatctcctcttcttataagaggacaccagccttcttggatagagcccccacccttaccttatttagcagaggaccaaaattcactgaaaatgttctcactcagtgagaaagtgaccactctgcacactttgattctagatgttaggcctgccgacatgtaacacaagcaaaatgaggcctccgctatcaagcctgcctttttggcaaactatattagggtttggccttacaggtagtaaaaaaatatgtatttgcatggctttgttttctgcatatatatcttcacaaaaagtgatgatcaggctacagcatatcagatttgaggattctaggacctgggttttgagccctcctccctcatttttttttatcttctcacataatttgacatgaattatctataagattctttacagtgctgtcttaccataaaactaagaaagaaatttaaaactataattattggaaatattattttgcataatttgtatatgtgatactagattaagatactgagaggaataaaacaatgcttatgatattaaccctgatcttaattcacctacatgttttaagattcataagtcatttgtacaaatctcaaatccagaatattttgtgtgttgtataatatgctatcagaggggtttttttttgtttaaaaaatttcctatggataatttcaaatatttgtgaaaatagataggacaggataatgaccccctatgtacccaaaacctaggccctaacagcagttattaacccagagccaatctgcctccttgctagcctgttaaattcttctgcatattttgaagaaataccagacatcatttcatccactaatattttagagtgcatctctaaaagaacaaatatgctttctttttaaatcaatataagtgccatgccattatcttaggaatgattgttaatttttcctcagttttataaaaccaaactggtttgtgtttacagtcgtctcattaatgtcctaagtgtttgtttatgaatcagaatctaaatgaggtccacagtttgttattattcagtacttcctttaagcctttttcaatctgtggactttcttcacaactttaaaaatatatatatttgttgaaacaatttagagtttttcattctggagtttgttgagtattcttctgtaatatgatttaaaatggtcctctgtcgtttgctttttcagtaaactggtaaatggatttagagctataaagcctaatacagtagccgtcagccacatgagctattttaaatttaaggttaaattaattaaaattaaataaaataaaaaacgtagttgctaaagtacactaggctcattttaaatgattaatagctacatgtggctaatggctaccacattgggcagtgccttgatagaacagttccatcgtgtgggaagttctgttagtcagtgctgctttagatagagtcttgatcaaattcaggtttctctttctttgtgttcttccattaggaggcccatgatgtgtgatgtctcattgtcctttttttctgatgttagcagttactgatagtcaatggctgaatccattcattcattcaagaatgcaaaatgttgaccataggagtttaaaagaattacttctgcttgaggtgatctccagaagctttatggctgaggtaacatttaattgagccttgaaatttctctaaaaatttgataagtgaagatacagggagaagaggatttttgtggttttgggttgtggtggttgtgtttgtttttgttttttaaacagggcagaagactaatgtgtttgatgcacaaggagtatgggaaattaaaattgaaaagtatatttggagcctatactatgtagatcctgaatgcaaggacaaggcattggattttatttgaaagggaaaatgcgatagtagctatttgttgattgcctaccgtccagttatcctttttctctttttaacaatgcccttaaatgcttcagaaaatgtaattcaacacctcactcctaggcttacgcctatcatcgtattccattttgttttccttgacaaggttgggcatgtgacctaagctgttctaaacagaatgaatatcaaggcttttggttgcaagtgatgagatacaaatactgtctcttcccctggatgtggtacttggaagtgctgtagttattttgtcaggatgatgaggaagccagcacacagcctgacaaaataacacacagagagatcaggcaaccactgatctctctgtcactatagattattgtttcctgttctagaactttatagaacagaatagaatcgtacagaatgaatacttttgtgttacttcttttactctatgtttttggaattcttttttgtcttttttatatgatttcatttcccttacctagttgtggaattgttaggtcatatatctatatgttcatcttgaaagaactgttttccaaagtggttgtactattttatattcccactggcaatttttgagagttctagttgaagcttgttttaaagctttgctaggataattacagagtagcttttacttggcagttagctctactcctaaggtgtgggtggacttcctggtctggtaatacccatgtgtttatcaaggtctctccactttggagctctctcttgctggtcagaactttagcgtcttccagatttgtgagatggaagtgtttatttaagctttcagtggtagttctttgcctattcttatatggtgtcaccttacacatgtgcagcttgacattcagcctaagactaggaccgtgatgcaaattttggaggtttttgttttttgtgttgttgtcttaaaaaactgatactgatactctcaatgtttctgttgcctgagcccctctaaactctcatctctgtctcctcagcttagcaagatctccctgctttgcttgggttctccctcaatatgccagagtccgggaagtctccaggcagaaagggcagtaataggactcaccttaatttgtttcccttttctcagggatcacagtcttacattgcctgttgcccagtgtctgatttttttttttttacatatttttctgttttcttaattgttcacagcagaattgctgatctgttgctaattcctcttttataaccagcagcagttccatgagctttttcttttaatcttttttcattgcaactgaaaatggggtcttctgccatgtcttccaactggctattgtttatatttacaaatgctttggatttctgtatgcttattttatatcctactaccttactaaattttcctgttctttatagttatttttctattgactgtcttgggttttccaagtagatataatctgcacatggacacagttttactttttttttaaaacaattcttgtctaatcgcactgtctaatattagtaactatagtggccactcctgtcctcatccctatttttagtagaaaagcctctaggctttccccttgaataagaagcttgctaattatattttgtttgcttctgttttatatattttcaattattttgtcaacagactaccaactcttcaggagcagggattctgcatgcctcttacttacatggactaagtattccctgctatgtgttatgttttgtactagtcgctggggttgcaaaacaaaaccctgctgtgtcccatcagaatactccccccaccccaaaattaagatctagtaaggaatataggcattacacagataaaacaaatgtgataaattttcaaaaagtgacagtgtcagatactaaaggagtctataacagaatgacctaacctagtatgggagaatcaagagatacctccctaaagaaataatgtttaatgaaaatccaaaggcaagagagacagttgatacttttctaaaggagatccattattactggaaagaagagatagaatgggaaagtgggtcacaagaggtaaagatttagaagtagttaggaagaatcggactgtggagagcttggcaagccctattaggattatgaacttttcccttaagtacaataaaataggaaccatctttgcttttttggtttatatgtttatatatgtgtttatatttgataactattctcactgagcagtagaaaagaaattgtaggaagctgagcattttcatttcttgtagctgacagtcatttaacttttaaaccaatgtttttctttcaaattggaatgctgtggcaggtagattttaattctgagagctaagcactatttcttttacaagcaagaaatatattcatgtctgaatccttttttaaaaaaagtaaggaacacaaactttttaatgtgggaattagtattgaacctgaaatctttttaagaggtgaggaatacagactttttaatgactgtgtatttgaatgttcaatccacgcagttactagctctttggaaaaaaaaattaccaaactactagaagctttggttttctcatttgtaaaatgaactgttgttttaaggattagctgagtgaacgcttgtaaggcacttaggatttggctggtacatacctatcaaatcttaggtgtatttattagctattcttaagaactttagttcttaaataaaaaggacagaaatatataaaagaagacaaagttaataaagcaacagggatgcacagactataaatttagacattctcttatgataacatccccattatataagtgagcaaactgaatcttaggagtcatttgaagttcatgactatataaatagtagagctgggattttattacaggagtctgactctagaacttaaacttcatatcactgttgtatagtttctttcctaaagcagcatctattttagttgattctctctcatattgtagtcaaaactacagaaagcaataaatggggttggttgattacttcttggtgtttagtgagaccaaaaaattgttataacaaactattttctgatttaggtgataatcaaactttttcgtacgtgaaaaatcttttttagggtttatctacttaactggttcattacataattagctgctaatgtgtagttaaagaagtaatgttttatcagacttttttttttttttagtatttgctacctctaaagggtgacgtctgaaaaaatatctgacatggctgcatttgaacactagtcatagtaagattggtggtgggtgttcatattcatatatatgaaattttcttggggtttgggagggggcattaaggagaatgtaatttgctttgtgttaacaaagcgattttctttgggctatctactggtaacctagaaataattgaaagtgacatcttcataaacatattttttagaatggtagtacacataaattaagtagcccacttcttcaagtgatgttcagaagcagaaacatcactttgatgttaacagaaattatcattgatttcttttaacttctaaatagtattgtttttaagctagagtaaatgtgtgggaaattaattagcagtatcatgttttctgttttaaagtgttaaccagtttttaaaatcattaatactttaatgaaattttaatatgttataattagcatgatatttaccagatttctgtttatccagaatgatgggaatgaactatatattctgttcacctgtttctccttttttgtaatataaataaaatttttaaagaaatctgtgcctgtttgtaacaaatttggccaatgctaaagtatacaattcaaatcttcctctctaattccagttccagaggttttcctccacatcagtgttatacccttaggctcatcagtgtttatataaatgcatagacatacatatgacatgtttaacatctgcatattataaactatacatacataattttaaagttaaaattaaatcatactttactgctcatctgaaacatttttaatttaatatgtgtatctatccaagttagtacatatataattatttgtttattgaatattttattataaggctgtatcagtttattcctgtgcatgttgataatagttttagatttttttttttttttttgctattataaagaatttcactaagccctataaggtaggtattatctccattttaaaacatgaaattgaggcacagagagattgggtaacttgccctaaattgcacagcaagaagtaatggagctggttttagaatcctggcaatatagctcagaatccacaatcttcaatattacattatgctggttttttgccttctgtttttgctctgtttaccaaactggaaaaaagatttcatgtttaaaatatatctaaactgggtgtgatagtacactcctgtagtcccagctgctcaggaagctaaggtaggaggattgcttgagcccaagagttctagtccagcctgggcaacatagtcagaccctgtctcttttttaaaaaagtaaaatctgatattaaaactctcctgggcataatatgctatcttacagatactggaaacattagtatcacaaattatgtaactgtgatttgtagcaatgtataatatagaagtagaagatttaagcccaaaccttgccagtgcttcttaaactttaatgtgcatatagatcactaagtgtgcatataaattcagattccataatctggaatgagcctgagtctctgcatttctagcacactcccaaggtggccagtactgctagtctactcgtgagtagcaaggatttaggcagtttatactgacctttggcaaaccttcttaggtgttttattgaatcagtttcatgttttgtttctgctgcctgtttttataatttttgtgtggtaaagaaatgggtacagtctttctggtcatttcaattctgtatgtgtgacatttaacaataaatgagaaaaagaaattgtgccttttttggcatcagtgcagagtacttaaaatgaatataatcatttatttgtatacttaatatggccttcccacctatctcatcatttccactgtttcattcttaattgagggaaatataatgtatgttttcattttgaagggtataactgtagttgaaccaaaaatattgttttatcactgttattttttctttagtaacaataatatactttacacagttacaaaaatcaacacctgttcaatgctatgtgccaggcactatatcaagtgcttaatgggcatgatttcattttaatcatcaggacatccctcattcatctttcagctatttgtgcgcctcctctgtatcaggaactgtgcctacagtggggagccaaataaacacaaattctgttctcctacagcttagtgcattggggtggggggtgcaatacaatattcaagcaattatagaagtgtgatacttgtaaacaaaaagttgttaattacaatatttgctattttctccactctcaaccatgaaagaaaattctgcttttgccttctaagctttttctgactagcttccttccccacctgactccgaggagaattctttgtctgttcggtttctgagctgttgtgatgccagatccaactaatgggtaaagagagaaacctttagaactaatgatgtataaaatacaaaattttaagacaaatatctgaagagacattgcttacattaatttgagggagtaaatattcgcaatacttaagattgttagaattgttggtgagaaaaatttgaaagatttttttgaagatttagaagacaatgcaagactttttttttttttttttaagtaccaacatatgtggccctgacagatattacaccgacttgtggctgatttggacacgcttttaggggaatgctatttttaacaagctgtgttctcttttttcttgtagcagtactgacttcccttttgattattaattgatagaaaattctttctggtgttgatcagatctatctatttgacctttatatataacactaccttgttgagatttccaaaatgtttgttttccccattactattatgattttgagcttcctagtattgtcttgaagattattataagaaactttagcttctctgtattaaaaggaactctatgtagttgtttctcttttaaagggaggatctgaaaaaattttgtaattttatcttggatattagtttattcattatgtttaattttaggaaatggtgctcttgcagaacattctgaaaatgtgcatatttcaggagtgtcaactggtaagtcattttttgtaatgtttaaatttcatgcatgacttatatggtaaatattgaaagccacctggtatcttacgaagtgatatttggctataaaaattattactgctttttgcagcatgtaataaggaatgaagtaactggaacatggagaaattctcataagataaaactgatacttgcatgcccatggattgattatacttttccaaacggactgcataattattttttcatacaaacattgaacctagagaaaagttagctcaagttgaattagtattttctttccatacaaagttatgtgacatgaaatttactgaaatgtgattttgaatgctatccctaggattagagccttagaaattaagctttttgcttgatttttatagtactactctacatataactattgtatttgagcgcacagtttatttgctgttaaaagcaacacagtatacttgtgtccatgaaattcagaaattcatcattgtggttaatgtattttttatactcatctaggcttttataacttgtaattactttataactttataattacttaaagacttataactactaaaatttttattcttaggccacttccacagctccgttaccatttttgctgtcaaccacagttactaggagaactaaaatatttatttttgcatatattgaaataggttttcttactgttcatttattatttccctatattgataagttttgtgtggttaaaactgtacttagtgtatttatcaatccattgattaacttctttgtgtcatcttgtaatttgtttggttcttttttcctcacatgaagcaaatcctgttcttttgttttatgtctgactttgtattcagaaagttaatagacttaacaaatactctaagggttagtgtgccctagtcaaacacatcaagcccaacaagcctagtttcctgaaaacgcaaagcaagtgcttcagtgcctgcatcaattttttttcatagtttgtttcacttttttaaaaatacattctcaaatgatatataattgtatttatcaaataacagtaaggttattttaaagatggccttctccctttttctttgcattttgaatagttaatgagaattataattacttttccaagttgtaactataaagtatgtttgtttacaaacattttaatttatacaaccaaatggttactgtttaatttagtagttttcaaaagttttggtctcaggacccattataaacttttaaaaactactgaggcctgttttagtctacgtgtgctgctgcaacaaaatactactgtggatggcttaaataacagacatcagtttttctcacagttctgaaagtccaacatcaaagtgctggcagggttggtccctggtgagacctcttttcctggcctgtagatggccaccttctcattgtgtcctcacatggccttttttctatgaatgttcagagaaagcaagaggtctcttgtgcctcttcttctaataagaacatgagtcctatggtattagggtcccatccttatgacctcatttaacctcagttacctccttaaaggctgtgtctccaaatacagtcacattgggagttagggcttccacatatgggcttgaggggggacacaattcagtctgtaacaaggacttaaaagagtttttgtttatatgggctacagctaccaatatttactatgttagaaattaaaactgagaatttgttttaaaactcattagttcaattaaaaataacagtaacctattgcatgtttacatcaatatgtagtatggttttatgaaaaatatatatttcaaaacaaaaaacaataagaacagcattgttttataattttataaagtaatgattgacttaaaagaaaatagctagattctcatatctgtttccgcattcagtcttttgcaacatcatgttttgtttgacatactaggagacaggccagcctcacagtgacgtataattggaaaagaaaggaatattttaatagcctttttcagataatggtgaatattctatgatactacaccaaaactcaacacgaggtagtttctttaaggttagttgcaatgtggaatctgaagccatatcattgagcgttttgtgctctgttacattaaaatctaattgggtctttcttaccctttgaatcaattttcttaccatgtatgtttttataatgtgcattgatcacttgcaaatgcagatttgctgagttatgcagattattacagagtatgagaacttatgaaaatttggaaatttagatagatatagtactacattctgaattttagattatacttatttttagctgtttacttgtgattagaccactaggctcttcttgagcattgataatacccttaaataaatttctgtttgaagaaagaaatcagcagtaaagatattttacattttttaatcttttttttcttctgaatttcagatacacatttagaaatatgtattagttttctagggctaccataacaagacgtcccgttctaggtaacttaaacaacataaatttattttctcactgttttgcaggctagaattctgagatccaggtgtcagcagggttggtttcttctgagttctttttctttggcttataaatgggtgtcttcttactgtcttcacatagtctcccctctgtgtgtgctgtcctgatctcctcttcttataaggacaccagtcattggattagggccacacatatgacctcattttaactttaactctttaactctgtaaagactctctctccaaatccagttacgttctgatgtactagggttagactctaaaatatgagttttggaggcaacacatttcaggccataacaaaatgtgtgttttaattaaatatatttatacgttaataaaatactccatttcagaagtgagtaaaaccttattcatggcttattttttctaaagtctcatcttacaaaatctttctaacagaatgagaagaataatacatgaaatctattccaattatattattaaaaataaatggatgctgtttccagaggtatgtctgggtacacagagtcattgctgttttttgttgttgttttttttttgagatggagtctcactctctctgttggccaggctggagtacagtgttgtgatctcagttcactacgaccgctgcctcccgggttcaagcgattctcctgccccagtctcccaagtagctgggactacaggtgtgcgccaccacgcccagctaatttttgtatttttaatagagacgtggtttcactatgttggccaggctggtctcaaactcctgacttcaagtgatccgcccaccttggtctccctaagtgctggcattacaggcatgagccaccgtgcccggcctcattgcattttttctgtggccagtacggagctatagatgtaatgtttaatagagtataagctttctgaaatccttgcatccccagtagaaagtagggccccttcagtgctggtctaaatagagagctagcctttggaagaatctcaaaatgcaggacttgctttctgttgagatcagcaagccacagaaatggtgagatgcttcagtattctgtgctgccatctatttctgctcttcccctgctcttttcacctctgctactccatttgccggtgctcagtgccctgctggattgtcgtttgcactttggaaagtatattgatgattttagaaagaattttaattgtctgcacctagtgttatcaggtaatttattttccaaatcaggacactttgaaagcgaaataatatattatttttaattatgctgcaccagtgacaaaaccaggactgttctggacaaatcaggctgtatagtcaccctgttggcaatgaattcaattcatttaacatgtatcaagcacctgataggaccttgtgccaaggagggtggaagtaagtggtgagtaaaatattatctgaaggaacttatcacttaatagcagaagtaaatgtgcaaactgtacctataatatggtctttttttttctttgtttttattattatactttgttttagggtacatgtgcacaatgtgcaggttagttacatatgtatacaagtgccatgctggtgtgctgcacccattaactcgtcatttagcattagatatatctcctaatgctatccctcctcgctccccttaccccacaacagtccccagagtgtgatgttccccttcctgtgtccatgtgttctcattgttcaattcccatctatgagtgagaacatgcggtgtttggttttttgtccttgcgatagtttactgagaatgatgatttccaatttcatccatgtccctacaaaggacatgaactcatcattttttatggctgcatagtattccatggtgtatatgtgccacattttcttaatccagtctatcattgttggacatttgggttggttccaagtctttgctattgtgaatagtgccgcagtaaacataggtgtgcatgtgtctttatagcagcatgatttatagtcctttgagtatatacccagtaatgggatggctgggtcaaatggtatttctagttctagctccctgaggaatcgccacactgacttccaccatggttgaactagtttacagtcccaccaacagtgtaaaagtgttcctatttctccacatcctctccagcacctgttgtttcctgactttttaatgattgccattctaactggtgtgagatggtatctcattgtggttttgatttgcatttctctgatggccagtgacggtgagcattttttcatgtgtcttttggctgcataaatgtcttcttttgagaagtgtctgttcatatcctttgcccactttttgatggggttttgtttttttcttgtaaatttgtttgagttcattgtagattctggatattagcccttttgtcagatgagtaggttgcgaaaattttctcccattttgtaggttgcctgttcactctgatggtagtttcttttgctgtgcagaagctctttagtttaattagatcccatttgtcaattttggcttttgttgccattgcttttggtgttttagacatgaagtccttgcccatgcctatgtcctgaatggtaatgcctaggttttcttctagggtttttctggttttaggtctaacgtttaagtctttaatccatcttgaattgatttttgtataaggtgtaaggaagggatccagtttcagctttctacatatggctagccagttttcccagcaccatttattaaatagggaatcctttccccattgcttgtttttctcaggtttgtcaaagatcagatagttgtagatatgcagcattatttctgagggctctgttctgttccattgatctatatctctgttttggtaccagtaccatgctattttggttactgtagccttgtagtatagtttgaagtcaggtagcgtgatgcctccagctttgttcttttggcttaggattgacttggcgatgcgggctcttttttggttccatatgaactttaaaatagttttttccaattctgtgaaggaagtcattggtagcttgatggggatggcattgaatctataaattaccttgggcagtatggccattttcatgatattgattcttcctacccatgagcatggaatgttcttccatttgtttgtatcctcttttatttcattgagcagtggtttgtagttctccttgaagaggtccttcacgtcccttgtaagttggattcctaagtattttattctctttgaagcaattgtgaatgggagttcgctcatgatttggctctctgtttgtctgttattggtgtataagaatgcttgtgatttttgtacaattgattttgtatcgtgagactgctgaagttgcttatcagcttaaggagattttgggctgagacagtggggttttctagatacacaatcatgtcgtctgcaaacagggacaatttgacttcctcttttcctaattgaataccctttttttccttctcctgcctaattgccctggccagaatttccaacactatgttgaataggagtggtgagagagggcatccctgtcttgtgccagttttcaaagggaatgcttccagtttttgcccattcagtatgatattggctgtgggtttgtcatagctcttatataatatggtcttaatgtactaaggcacattatggcaaataatgaacattaagttagaatatgaatttgtaaaaagcctagttaaaatatctggtgagtagtaaatgaattaatattaacttttcttattaggcatagtattaagggcttcattttgtttactcatgaatttttgggggaattactaatttctaattaataatatatttttggttcttgtacttggaataatttgttctgtttttaatattctgtttatttccatcttcttcctcctcaaatccttgccaggaaagataaatctttgcctttttgctcgttctgatgctacagggttggcataagaaattgtagttaaattatcaaaaagtatgtatctagttgttatataatgggaaataatattggataaaatcttaatttttgtacttattttaatttagaacttttcttggttcagaattttaaatctctcttcatatataagctagagaaaggagaaaagacaaatggtatttttataaatttaataatatatgaaaatcattatgaattataccacagaaactgccaagtaatttaattgcatacatgagagagtaggaaggctcttttaatcgctttttaaaaaagtgtctaaattatatgtttctttttgaaatgtttaaaattaccaaattactgctcatctgctacatagaatgaaatatatcttacgtcaagttgatttaccacaaggcccttgtacacattaaacaaatatatttgattttttaaaatatatctactttaaactgaattactctgtaatctgtgatattgactttaatcaggatattctagaaataatttatgctgtctttattcttgattacttctaaatcaagttttttgttttcacaaattctattacacaagtttcattaaacatttagaaaaaagcaaaaagattaagaaaatcacccattaaccctaccttcctacaataattaatagtagtatattaaattttttatttgtccttttgtgtacataccttaaaaataattgtatatgcatttgaattatccctaattttatctcctgctctttctgtttaacactatgtacatttttcccttagccttcatattcattattttaatgcctgcataaaatttccatcatgtgacttcattacaatgggttgtttccaatggattttgcctaatttggatcatgctcaagagacatattcatatacagttgacccttgaacaacatggtggttaggggcaccaattccctgcatagtggaagaaaagccatatataattgttgattctccaaaagtttaagtactcaatagcatgctgttgactggaaatcttaacaacaacataaacattcaattaaatatatgtacgttatatgtattaaatactgtattcttttttttttttttttttttgagacagggtctgactttgtcacccaggctggagtgcagcggcatgatctcagcccactgcaacctccacctcctgggctcaagccatgctcccacctcagcctcccgagtagctgggactacaggtgcgcaccacatgcccagccaatttttgtttttgtagagacggggttttgccatgttgcccaggctggtcttgaacttgtgagtgcaagtgatctgcccaccttggcctcccaaagtgctggtattacaggtgtgagccaccgtgcccaggcttaaatgctgtattcttaaagttagctagagaaaagaaaatgttattaagaaaatcataagagaaaattcatttacagtatgctactgtatttattgatactgtaagtttacattatctatttacagatgagtcatctgtttgataagatgggcagctgcagttgcagacctcagtctacagtacatatcaagcaattcggctttttcttgtaatgtcatgactttcctttgcttcttgggagcacttgcaacatcactagtggcactttgtatggatccagtggtgttatttggggtttatggtattgcactaaacacaatgaaaaatacacgagaaccaccagagatcacattgtactgtgacacacaatttactggagataacaactgctcacatggagatgattagcatcacacagcgatttaagcagatacttgcaaattgagctcaccaaaatagcaatgggaggtggctacagaattattagttgtatagtatgtcatataattaattttattcagttatgatttagtattcatctttatacttctcttgaatgtaaatggtactgtgtgtggtctgcaagtgtttgtgtaggttttgataaattctaactctttataataggttagtgtattttttatggtagtaaatgatagactagtattttacatatatatgcattcatgatatacctaattttttttcaaaatttccagtctgtgtaatttgtctgcaaggtttttcaaattgtcacaaatctccaaaaaattttccaatgtatttgttggaaaaaatccatgtataagtggacttacacaattcaaacccatgttgttcaaaggtcaactgtatatctagccttttttatttctaagaatatttccttagcatacatttctgaaagtgaaattactgtatcacaggtcataaataatttaatgactctagaaactttttgacagattgccttccaaaaaggatgtactaatttacacagttgtctgcatttactttcagtacaatcatgtttttcttgcttaactttttttcttattatgtttccattaaagtctcaaccttttatttgctgtcaaactgtttttttttaagtaacattttcttttcttcttgattcatggcctggagttgtaacatcgcaaagaataagagaatgagatttgctttcctttatagttaggcaaaaactagcctgaagtttataaaatattttctggttgctaataggaacagatgttaaggcttgctgctttctcaggcagaagctttttttacataggaagattaacatggtatttccaattaccaatgatacaacttccaaatattcctaccttttaatgacagctgaagtctctgtctgaggttagcttgattttgagtctactctgcatttgacttagaatcttctgtcaggcaaatctgacatttctgtgagctgagagagaatatttacttaggaagtttctttcttaatccgtattcatattaactgaattagcagagtatataaaatagacttcagatagttttgaagtattgtttatgctgtcagaattttattctatcaaaatcatcaccctttcttgcttttatgtatttgcattttatagtttctattctaatattcgaaggcctagcacattgctaatcctgtatgccttttacaactaataatttagttgtggcctttaaaatagggacatattttctaaattgcaataaatttgctttcagattagttaacattttgtaataatggagagtactaaattaaaatggcttttgtttttaaccacagctttgggcttaaatattataacatggtattttgaaattttcctggaagaacatctagtctgataaagcttttattatcctagaatgtttaagatcttccaaataaagaatctgaaaggaaataaagcttaaattgtaattatctctgatagaagtttacaattattttttaaatatagaaaagttacatgaaaaagtagcaggtcaaatggtcctttgcacctttcctatgtaattttaatattattttacaattattcaattaggtacctggacctcttgttaaagttactgagaagaatttcactagttcttttgaccagtgttataaaaatgtctttcatccatgtttcagatgaagaaaagaaagaagccttattacattttagttgattattaatacattagggtttttaggatttcagaatataaaaacagaacatagtttgaacccaagaagctatcctttatataaagaaaatgagtagggaatatgagacagagtaaattcttgatatatatatatataaaaacattactataggatgctaataatttttaaagtcattgtctaccttcagagtttacttctgagacacttaaagttttaaagtagcgaactccctttaagttttggaaatgaaactaatggtggtattattatttctatattatatactctataattgaatcatggccaatgtcttatatgaaacatctttatattatataattgtaacctattttatattatatatcacatatttattgaacaattatgtatttataacaaaataattatgttatatttttatgttacattacaggttgactatcccaaatctgaaaatccaaaaatcaaaatgctccaaaatccaaaacattttgagcaacgacataacactcaaaggaaatgctcattggagcatttcacacttcagatttttggttttgggatgctcaactagtaagtatatatctgtacatattccagaatttgaagaaaaaaaaatcaaaatacttctggtcccaaggattttgaataaggaatactcattgtatgttataataaacaataactccagcattagaacagcacgtgtgagtaccagaactatagacagaacaggttgtattgtgacagggtatgcagtgcttagatggtagaagtgaagttcatctgatggatatatccatttcattgagtgagccaaacctagtgaacgtaaaaaggcaagctctgttcaagcatttgacattttcttttccagtctgtaactttgggaataactcttcaaagttgataacatgttggttatctgtaatttttgccaaggcatgaattttaattggatgtactgtgaaactgttgtgcaaaagccagtcacttggtggataagcaaactgtacttgggtatcagttgactaacagcctgatgtaagtaagggggtgatttgatattaaactgcagtaatagaaatacagtatccagaaccaagcaaatgatagttcttctttactcttcatgcaaacgtactctggtattgtttatttctgggtaccacccttgacaaaagacacagtaactggaacactcatagaagatgtgagtatactaaaaactatgtcaaagctgatagagatgacctacaaaatcgtgagctccaaggccagtttgttagcttaagtgaggatttctgccttacctttttatgcttccagccagagtcacagtaaccttcaaaaattagtaatttttcccatttgggaaatagtagtagcttgctttagcattttagtcttctgtagtgcttaaaataggaaaatgtaggtaccatgttagtaatttttatacccttgcaggaaaaaaaaattgccctcataagccctttaaaaaaggcataaaaggatgaatcttctctattcatcttacgttatgcattgttagcaaaatcctaaattattcttactaagaaatttcagggtgaagctggctagttagttccattttaggtgggtatattcagtttctttgctctcctcatcttcattcatactgtgctatgacccgttttttttttatttctccttctctctttatatttttgcctcttctgactttgtattttattttactgccatataacccttgattatagtttgattgttctgaacattagtgaccttcaagataccaagaaattacctgccttgattacagctgatagccaagtaaaatattttggtccttaaagaatgtcacttagaataatatgaataaatatattgctgtattcagtcttaaatatcggtactaatgcagaagaatatttaaattataaacagctggatataagatttcctacttgccatggcacttgcggtttctaataataagtctcagagtaatgagagtcctaagtgggagtgatggattaatatcattttttctgcttgcctgattcttgtctttcaagtcatagttaaaacctttcccatcttagactagtaaatattgctacaagttgagcatccctaatctaaaaatctgaaatttgaaatgctccagaatcttttagagcactgacatgatgctcacaggaaatactcattgaagcatttcagattttggattagggatgttcaaccagtatgtatgcgcaaatattccaaattttgaaatccaaaacacttttggtcccaagcattttggattagggatactcaacctatgttcaagtgctagtaattattcccatacagggagaagttcagttttctaacttcttttttaaaaagaatgaaatttggagtaattctaaggaaatcttactcatgttcaatctctgtccccttccaactctgtccatcctcaaaatgttgacttctgacattcacattataacgcagcttggctcaggtgccaaggagtcagaaaaccccatttaaagagtctggagggtcagagaaatcaggacactatttaggcaacaaacacagtcaagatacaggaagaggacttttgaatcaaagtaatttctgcctagctgtgggcgtgtgtttcctgttcaggttacagggcttagttatgttatacatggcagtccaacaaagggcaactatagtactctaacttatttttcttgcagattccaacagttggtcacttgccttgtattctcagtggcccatagactctatgctgaacatgcatgctttccagactgtccattattaagtgtctttaagtatctgtccattgctctttcctttgaaatgtctccctcagcctccacttcatccccttattgctactattctactccttgccctaagcatcttacccataattaactatatgtatatatgttctcttatcattaaaagtaggttctagaatgctgtttataaaatttttaataccaaagatactaagaagctggtcagttctgcctgtagttcttagataatgtgtagcaaataaggaatcaatctttagaagctttaaaactactaactatacttattttctctgtgttattatagattatctaccctttctatccatgttaatgtaggaccaatagttcatttttctagaatagaccacttttgtcatttaaatgctattgaaacggctcccttccacctccctggtaatttttccagatgttatagggagttcgttagtgggcagcagtttgccttagtggttaagaatacagcttttatgaagcctcttgtctgggttccatcccagctctgagacttacagcttttttgtgaccttagaaaaattaccaaatttctctgtgcctccatttttttcttatctgttaaatagggataataataataagtattaaggtacctgccaggtaataagagttcaataagtgttaggtaattttataacattatcatcagctgtggatccaaggcctgcatacatgcttcactttaatgatacttacagttcttggacttggaaaccatatatttctgacttgaagcagaaatctcatcctcagcactatgtgtcatacttagccttttaagttttcaaactgctattattttcctaaattaacagtaggccaggaggtacctgatttttatgctaatcatctaactacatactctgctttttccatgtttgggtgcctttagttgtttgcataagcataatattttccatgtattgaatgattcacttgttaactttcagaataatttttactgtcatcccatatggccattcaatccagacaccatttgcttaccaaatttttattttggagatggtgggtttctttaagtacatttatttccattggaatcaaatccttcttactagttttcaacacttggaattgcttttgtactcatcagccataatggaattaatattctttataatacactctatacagtactctgaaaaatgagatggccaaatgacactaaccaccgttacctatatatgctattatcctttgcttatgaacagagtgagcatgattttgctgtcgtgaaactttcataaagtaaaattgtacaaaaagatgagtttttataattgctttttaggtgatctctttgcctcactggtttctcttccctcaataacctttacaaaatacttggatcacatcacttccttttgtagtaggtctgtcttggcttgactgctgtctatagaatttgggtcattaaattcttttaactagtttagagtatgcttttctgtggctctaccaacttctcttctatgaaagaaatcttttgttcatagtcaagcataaccttctctgttctatacttgtataatataggtttttggtcggcctttgtttctgtttaattacaccatgtctataactgaacatgtgatactttgcctaaagttacttgttatgcattaaatcatgtactgtattatctggtatgctgtcatattaactgttatatgcttcttggattcagttaaaaagtatatgtcattgttataaaactataatttccatgagaacatgagttctctatttcttttgtgcccttcatatgtgtcttataaagttaggtggtcagtaaacataaacagacatttacttgcatttcagttttgtgatttattaaaatcaaagtcaaagatttcacataacttttagtctcaactactttttgtcatgaagtatcaactcttgtcagttttaaaaaacccagttcttcatctgtggagcaggaaattatactttttctttgacagtagttcagctctaattgtaaatatgtactttttctgtaattttttaggtgttttgaaactatgaaatctcaaattgtaagacagcttgactttattttgaagtgatcctccctctttcatgtgtcttcttaatagaggctgagcactgccaattttttaaataattgatttaaatataataagtatgatgcattaatctagttttaaaaccatagtcctttgcttttctgtaggattattaaaatagtataagtaaaaacaagaagtcttcagtgtttcatcagttaactttgccctgttttctaaactatacagtgagatctttatattttaaatgagaaaactaataccaaaatcttaagaactccatcagaggatctctacctgttcattcttcagttaattctccctttcttaattgacaacatacatgataaattttaaaaatatgtattcagttaatcttttcatatagtttaaccattagcattataataatgtcattgccttttttttttcatttcagatgtcctatacactacttcaactgtaaattaaataggcttttgtgggggctagtcagatagcctgtaggttcctactaagaagatgctatctacgtttgaaagttgctatcttttgaataaacattttgaacctctttaatttggggatttctatttctgggttatagaaaatttataaaaagtagagaatgtagatcatcattatccaaagtacttgaatatttgtttatatctaaagataactcaccaacgtaaattagatgatgtttgtaaaacaaaaagttgatactggctgggcttggtggcacacacctgtaatcccagtactctgggaggccaaggagagtggattatttgagctcaagagttcaagaccagcctgggcaacatagggagaccccatctttataaaaaaataaaaatagtaaatttaaaacattgatgcaagtaattaagagatgtattaaggaagcaaaatgaacaaagactaacaaggcttctgagagaagtgttggcatagatcacttacaactacataccttttaagtataaccctagcaaataaaatatcaatccaaatactaccacagtcaaatacctgtggacatttacaattacaatcagtctatattctgcagccatatatgcataggttcatgctcccccacttaaaggtatttgcttttaatggagaccaatttaatcaaaactaaaaatacacttcagggatatccctcatcaattaaattgttttgttttcatagtggtgtgatgtcttcatatttccatctgcattttgcaccttcccaagatagcttaatagagacaaaaaccaagcagtaattttagccaaaaaaagtaaccacattttgcaataaagaaaggcagcttctatagggttttcatattttttcttaaactctgaaaacttctacctctggttatttcaaatcattagcatgctgggaataagatcttacataattttgcattgtactgacaagatttatttatttgccaattacatataaactaattcttaaggaagaattagccagaccatagctgaaataactatgtttaagcaatagaaaaggtatgaatagaatgaatgtaagcaaaagaaggtcaagtttgatgtattttaaactgggaggatagtcaaaatatagaaagatgaagttcaaaccatgtaaagattttgatttcaaacaaatatttatttcctaaagtgaagttttgtgagtatgtgtcccaaccctatccttcccatggcttttatctgtgtcaggtaaccagttaatcatgacataatttctcattctttcgagtgcataatagtgcccagcacttacaaagtaaacaatcacacatcctctttcagtcactgtcctctttctcacttagcctgaacacagccttagtagccatctcaatacagcattccaggcattactaccaaccagtctgatttggcatatcatgtaatattgtttactgacagtttactgtaatacaagcagtgtgctatgtcttttaccaaaataattgcatgtaatccttggaacatcctgtgtactagtattttaatccccatttacaagtgaggaaattgagacttggtttttttgtttttcttttgttgttgttttttctgtcattttttttgagacaaagtcttgctctgttgcccaggctggagtcagtggcacgatctcagctcacctcagcctcctgagtagctgggactacaggtgcgcaccaccacgcctggctaattttttttttttttttttttaagtagagacggggtttcaccatattggccaggctggtcttgaactcctgatctcattatccacccgcctcggcctcccaaagtgctgggattacatgcgtgagtcaccacacttggccggagacttaagttttatctgttttatcaatattataataataagccacctcaaatctataatgtaaaatgagtaacagtaatataaatatgataaactaggaaaaatgaaattacaggttatagtaggtactggagctgaagtattaatgataagttgggactgggaagccatttataaagcactgaaataatgaaaaaatggaagacccagaggagttcctttggaaggttggggcagatgtgtaagagataaaacaggccttggttccctaagaagtggtgaaggcaggctcaatttctgactgaaatttccggttttaatctctgtgaggcctaacttatttcctgtccttgaaaattcttgaaaacgcctgtagtattcttcaatttctttttacttcagtacctattccatcaaacaaatgctgcctgagatgatgtagattcagaatataggatattctgaagacggatttgggaaacacacaggtctgatcatgttgaatttgaggttagaatgtccagtgggcatttgactatgcaaagcctctgggttaaaaattttaaactcatgaccatagttgaaattgtaaaagtggatgaaatcttccattgagagtgagaagagcagagggctttggaattaaccatgaaaccagtatcaaggactggctggctggctggccaaggacagaggatctagtgctagaaaattaacacagaatagagttagaaggagaattagaggaggtgatgtccacaaagtctgggtagtacagttccaagtctgggtagtcagtgtcaggtgctccagaaagatcaagtaccttgggaatgagtgtccattggatttagcggtgaggtcactgatggccttttcctgctagcatggtttctgtggagataaggtcagaattgaaagtctatttcagtgggtcagagaaaaaatgcaaaggaagaaaatgaaaaatttatcaatgtatcccattgagctatcagaaatatagtgggaagaggtgcatgattgagggctgaaatagaccttagaggtaatcaaatagcaactccgtatttcaacacatgaggaaattattaatagcgcccccaaaaatttagtagtttatattgtgcaaagccagtaagtggcaggtagaacagacagcatctaggtcttctgataccaaatctgccagtatacataggcaaactcttaacccaaaagggagttaaaaattgctttaatggtttcttttggcttttgaaatgtattctttcttagatatagaaaggaatacattatggctgtgctacagcatatttgtctacatactcagtgtgttgtacatgcagaaataggttgaaaaaaagccactggctagatctgaagccagattccaaattcagtcatgttggaaatgtgcataactaaatcaatatatatatttataaccaattcaggaagaaattttaagatactatggttttgtttttgattaggaagaatcattaatattttaaaataatgttataaaagtacatattgaattagaaatataaatattgaatctcataatagtcattcttatttatgggtggtatgtcttatccctgggccgttgcataaaaataaaatattcacaaaatgtatttttgagtaccatactagaatcttcagttattggtataagagcaccacctatgggtttctcatgtacttgaaatttttttcctaaaacaaaacctaataaaattctttctagtttttccctataattattctatcgatttagtcaaaggttaggaatgttctttgtcctagattaatcccaccttgtttttggctgtatgtcactgctgttaaaccatttaataaatagttgagtacttacatggtagtacagaattataattgagttaaatgtaatttaactcaaaattgtattagtctctttaacgtaggtgaatcttttaataaaaatgaacaattttccatattctggggaaagggtgatgattgtttttggctgtttatttatatgtttgtttatattttcatgaacttaagatttcctttagcttactgcgactccagaatgctgtgttaggagataatgaaaagtctcgctctgtcaccaggctggagtgcagtggcacgatctcagcttactgcagcctccgcctctcaggttcaagcaattctcctgcctcagcctcctgagtagctgggactacaggtgcacgccaccacacccagctaatttctgtacttttagtagagatggggtttcaccatgttggccaggagaaaaagaagttcttacaaataacttagctatctttttattaaattattgtaatgataactcagagtaaagtggaagaaaactggcagtttattattaataaactcttaaagaattacatttggatacatatagtctttttctaaaacgtcatttattaaaattaaaacttttttgtaagggagatttactaacgaaacagcagcaaaaaaaaaaagaaaaaaagaagctttgactatgccttggcaatgagatgaatgctaagcccttgatatatctgtgctgtatgccatgaatctgttctgaaagcgattcaaaacagatgccctttggcagtgcaccctaattccagggcagacccatttttcgatatgaacttttttttctgcagtagaatatacttttaaagctttgattgcatgttttcttcagggagtaggttattctatagaaataaggattgactttaagtaatatagcttgttttattttgatcattatggataaaattctttaaattacataatatacttcctagcattcttaacctaaattgaaaagtgtataacccctgttacggaaaacaaaaacaaaaacaaaaaaaagttgccatgcatggtggcatgctctttgtagtcccagctactcaggaagctgaggcaagaggatcacctgcgcccaagaattcaaggctgtagtgtcctatgctagtgcctgtgaatagccactgcactccagcctgggcaacatagtgagatctcatctcttaaaaaaaaaaaaatgctgggcgcggtggctcacgcctgtaatcccagcacttcgggaggctgaggtggtaacatcacaaggtcaagagatcgagaccatcctggccaacctggtgaaaccccttctctactaaaaatacaaaaattagctgggtgtggtagcgtgcacctgtagtcctacttactcgggaggctgaggcaggagaattgcttgaacctgggaggcagaggttgtagtgagccgagattgtaccactgtactccatccaccctggagacagagtgagactctatctcaaaaaaaaaaaaaaaaaaaaaaaaaagtcatttttccaaattacaattgtaatagtggtatttggccatctcttgggttacctgatttttaaactacagcagaacttaaaaagcatgggagtgcaggccgtgttttataccagtcattttgcctatactgattcattattcactcaacaactcttagatcagtatgaatattaatttattatgatgatataatacaacagtcttaccttttgagagacaggcaatatataaattatgagctcatggtttttgagtttagtatgtagtgtttgtttttctgaaaatttactcgtcacttctgataactgtttatgtacccctggcagctactctccccacttctaattttctgcttctaatctgctgttactttaaaatcaagtaatctaatttgttgaaattgtattaaataagacgttctagaattttaaattctactaaaggcttaaacatcacgtatttgattgagagagaataaattgtcacattatcaactgaattctggataatgttaactatattgcaacgagagttccagatagtgcaagaataatccaggaaagtgttggtattagttttaatttattctatatgcatgaagattttcctctgtgatatgcagatgtctaatcacatggtgatattttaagcactatttcaaaattttacttttaaataatgtaggaatcattcataaccctgtaataaatagcttggaagtattaatggaataaattgaagaactgctttgcagtgattttgagtgttttactatctttattcaatcatccactaacttcttaacaaaaattacaatccagcatcttactgttaggcttatttagagtaccctaaaagcagcattatgctcctaaggatctaaacaaagtaggtaagcaaatattggaaaggtagtttatgataaagaaaataaacttgaaagatgagttttgaaaaaagatgggtggatggatagatcagtctccatggccaaagccagtaatcttgaactcttattcagtgatccagtttgaaatttccttgcctgcccaaaacatgtacagtagtccctccttatctatgagggataccttcaagaccctcagtgaatgcctgaaactgcagagtaccaaacctgattgctgtccagtttaatgccttttccatcttaactaagcacttaggtactgcggccattaacttttgcagtttgaggtatcacagcaaaactagcatgaatttctttttccttcttcataatttcatggatataagattcattcttaccttagagctcagacacctcagcatacgattttttttctattgttgagaactttcaccttttcacttaatggaagcactttacagcttctctttgacatatccgaattaccagcatcactacttttgtgcttcaaggccattcataatggcaaaataagggtgacttgaacacaagcacttcaatactgtgacagttgatctgataagtgagatggctactaagtaactaatgggtgggtagcatacacagcgtggatacactggacaaagggaagattcatgtcccgggagggacagagcagcacagcaagagatgtcatcactactcagaacagcacacaatttaaaacttaagaattatttatttccagaattttccatttactattttcagaccactgttggctccaagtaactgaacaatgaaaagcaaaatgtccgataagtggggctactgtattttattggaataagggactttatctaaaagggagaaaattgaaatatctcattagaataatagctttttaaagttgatactaccatatcttattggttattatttgatgtgtaaagttttttggtttttaaaaaataaacactgatttacctaataccatttaaatgtgtaataataaggaaagattgctttggctatcttccagcttgtggagagactccagagcaaatacgagcaccaagtggcataatcacaagcccaggctggccttctgaatatcctgcaaaaatcaactgtagctggttcataagggcaaacccaggcgaaatcattactataaggtaattctacctttctgtattactatataatttattacaaaacataaattccattttcatttattattacttaacatgcagtaatataaaaagaaggcttttcaggagatgtaataaagaacagctattagctattggtgtcatcttaagagtaagagtaacagcccatctggtatgtgttttgagtattttctaagggtggtaatgtatttgcattgaatcatctatattcttctaagctactttttaacaaaatatagacatttgcaaaatagcctattagggtcaagactaacctttggcagtggaacaaacaaataaacaaaactcattaattcacttggatatctagctcttaacctttgtctcattagtagagccttctacctaaatgagttaaaacacaatttgtcatgcctgtctgtatatgtgtatgtatgtataaaacttgaaacaaactgataatggagaaatactatatctagaaaaatctttgtttataacttcgaaacaaaagaacatttgttaagaatacaaatgaaaggcattcctaggggaaatagctgtaagtttaagattctaagaatgaatgtgacatataaataaggaaggttaagattaaattttaaaacatttagcaaattacttgcagagaaaaacagtacgggaataagattgtaaagaatatatttagtagaactagatactgcttgcttaggaaaattctatcaaggccattaggaaaaaaatatttacctacaggggaaaaaaaaatagcccgaatgaagaactgcagttggaacaaaacacaaataagaatgtcatttccatcacagagacagtgtagcacaaaggcaccttcaacatgttttcatgtgtaacattgtatgggtaggaggcatagaattttagatttagaagagactttggagatcataaactcaaattccttcattttatgtttttaaaataagacttatacatttagcctactttctcatcttttttcatcttccttttttgtatttattaactgatgaggaaaccaatctctcttgagaagcataactgtcatctatctcctttttttggtggaaaccacaaacaagggccatagtttgttttccttttattttcctctaccctacattacctcttctggaaccccagagcttggcacatacaaaagctgttgttctcctcctccatgcagtgtttttctcttgcctgattgagtggtagaatgcaccattaaggttatctttctgtaacagggtcagtgtttaaatgtaaataatatacctattttctgttacttgtagtgtgactaagtatgtttacaaaataacatttttaccacatattgggagttttttagcataaaactagaatttatagagaccttcaccttttaacctaaaaatttaacttacaacttatagctcagttttgtaaaacttgaaaatcttaccagcacagaggagattacatgaaatactgccatctggttttgataatgtattgcatccttgagatttcatgaggttaagatacactaaaaaccaagcacaatactgaaatgcagaataaaattgaagtgagccctacagctaaaggaaaatttcctgaattttagaagggagcaatgaatttcgatgtatacagatcagaaggtgattttagtaattgttcagattctttactgaagtcattatcatggtaataccataactttaaaaagatgacacacctgcatatacacaaagacaagttttacatatgattatcattgcataatcttaaatgattcaaaagaatcatatgcataattaaatgtagctcttttagacatacaaatgagtcagtattaggaaatattaaattaacttaccatgtaaacaagtcaaaagaaaaagtatatgattatctagtgtacacagatgctttgaagcatcttggtaaaaaagaaaatcagcattcattcctgaatttaaaataaaaattttaaattcttagtaaaatggaattagaaacatgattttttaaaatctggatagaagagggaaactaaagttacggagtaaaaacaatactgagaactgtctgtataaaacttgcttaagatggtgaaataaaggcatttttacttcattcctctcccttggaacccactataatcaacaaaggccaccttatccatggggaagagaggattgaataccagcaccctgcttgaagccaaggactagggacgggcaattttgctccagacaggaggctgaaaaatcttccaccaaccacagcctgaatttatatggggctgagagcttagagagctgagagggcataacctaacaaacatgaataactatgtcacctgctgactccatgaaaggatctgtaatactctgaaccatcatttaagacttgttctggaatgtagacccaagtaggggaacatagaagaagagaggattaaaaaaaagagagaaaaccaaaaaacttccataaaataaacctgtaaaccaaaattccagaatgtgtgaaaaaattgaatgctgagaaaaacagccaaacaaaattaagttggaactcaaatttactccaggcattttaagatgtattctgtcaggaattatttcttaactttctttatgccacggccacctagtattctggtaaaacctatgtattctttcccagaataatgtgtttaaattcattaaaaaaaatacatagcattacaaagggaaccaattatgttaaagtacagctatcagatattttttaatatttgtaatgtaatatatgcttatttatgaacacattagcaaaatcaagtggttaatttcaaagaaaaaattttacgtgtaaatagtatttttagatatctgtaaaaactgaaatgtaacataaaaatatctctaattttgaatagtggtggagtggccagtgctataaatactgtcatggtttgttgtttataagtgtaggaaatgctaaattttagtaaaaggttagtgaaaataaagctttaaattgtttctaccctatttgtgatttttgaggggacaggagaaacaccgaatattcttacttggactttgttagaaaaaaagtgtgtttcagcatttcagttaaaatatcaaaaggtagccactgattaaaaataggagtaatattgagcagttaacagaggaaaaggaactttaaaaatatattcaaaaaagacaggaagctagatgtggtggctcacgcctgtaatcccagcactttgggaggctgaggcaggcagatcacttgaggtcaggagtttgagaccagcctggccaacatagcgaaacctcatctctactaaaaatacaaaaattagctgggcatggtggcacgcgcctataatcctagctactcaggaggctgaggcatgataactgcttgaacccaggaggtggaggttacagagccaagatcatgccactgtgctccagcctaggcaacagagtgaaaccctgtctcaaaaaaaaaaaaaaaaaaaaaaaggaaagaaggaaaatgagaactctctcccaagtagaaaggttgtaacacatctaaaacaaaactaatacagaatgtctaaaaacaaggagatgggccagatgctgtggctcgtgcctgtaatcctagcattttggaaggccaaggtaggctcaggaattcgacaccagcctgggcaaggtggtgaaaccctgtctttacaaaaaatacaaaaaactagctgggcatgatggcacgttgcctgtggtcccagctactcaggaggctgaggtgggaggattaccggagcccaggaggttgaggctgcagtgagccatgaatgcaccactgcactccagcttgggtggaagaatgagacttagtcttaaaaataaacaaaaacaaaacgagatagaaaaggttagttttggagctactcatcaagagaaagctagtgtaggaagattaacatccattgtaattgagcttaaggcacaaaatactagtaacaattggggtattctaccaggaaaataaaccagcagtaaatttcatttacttaattacatagcctaaaatacatgcaaagcaaaatgtggagaattgcccggcaaatttgaccaatccacagttgcagtgggagatttttaacacacctttaatacttatttcaacaaagaatacacattcttttcaaagacatgtggaacatttataaaaattgattatgtttcacatcacaaaggaactcttaatacatttcaaagactgtacatcattcagattgtgttttcttaccacaatgcaattaaaataaaagaaaaaaataaacctgtatgtttagaaatatattcctaaataactcctgaattaaagaggaaatcacaatgggaccaaatattttttaaataaccatagtgaaagtaatacatattaaaactgttagaatacattgaaagaatacttagaaaagtttacaactttaatgcattgatttaaaaattagaaaataaataagctcagcatttaactcaagagttaaggaaaagaattagagggtaaattttaaagtagcagtaaagaccaggaaaatacgcaataaaattcaataaaacaaaaagctgactttctgaaaaactcaggaaaatagataaaactcaaagcaaaactgaagaaaaagagaagataaaaagagcaaaagtgtctgtagttataaacaaaatttttaatgtcataagagaatattataagcagttttatgttaatacttttatacaagtagatgaattggattattttttagaaaatttatattactaaaattgattcaagaagaattagaaaacggatgaaatcagtagccattgaagaaattgaatcagcattcaaattaagactctagaactagttttataggcaagttttactaaatgaatagaaaaggaatttccttaacctggtaaagggtgtctgtttaaaaattttcaaaagcaaatttaatgtcaaagttaattatagcaccaaggaccaagacaaaaatgtgtgcttttactggttatagtagaattcttagtgaatgcaacagtgcaacagatagaaatcagtgatataaagaaaataggaaggaagagaaaacctttatttgctaattatatgtttgttttaagcagtctaaagcaaacttaaagatcacagataggaaaaaatgtctttaaattgtatgaaagtactgtgtacagagctttgtagtaataaattttactatcaacataagatcaatttctaagaaaatttaaatggtcaaaagtttaagaaacactgattaaaccaaaaaacatcaagaaattgaaactctctccctgactcaatatattctaaataggcacagagcacaaatatgtcaacagtgcttttattacacaaagtactatgaagcatttaaaaaaccaaaaagtaattttacttatttaaaaatcctaaatgaattagcaaactaaaatagggtatacatgaacagatatttattgtttcttattctaaacaaggtttctgccttcatgaatcttttttttttttttttttttttttttttttgagagacacagtctcgctttgtcacccaggctggagtgcagtggcgccatcttggctcactgcaacctttgcctcccgggttcaagcagttctcccgcctcagcctcccgagtagctgggattacaggtgtgtaaaaactaaaactctgaaatgcttaaaaaatagttgaacatctttgggatctttggaaacaccaagatagcttagagaggacactaaatgcactaaacataaagcaaaaataaaaaattagacttcatcaagactaaaattaaaaaccacgcccaactaatttttgtatttttagtagagatagggtttcaccttgttggccaggttggtctcgaacttctgacctcaggtgatccacccacctcagcctcccaaagttctgggattacggcgtgagccacctctcccagcctttgccttcatgaatcttaaatgtttagtggactaaaagtttattaagggattccctagtttgaatgggactagacctcccataaacaagagctattaagtttggataagatattttaaaaccaaactagggattccctagtttgaatgggactagacctcccataaacaagagctattaagtttggaaaagatatttgaaggctctggagagtaataaaaaactggcaaaaactggagagtattccacccctgaaagaaggaaccacacttcgtgagataggcttgtttcctaccagttctctgaagattcttgccagtctgtgcaacgtggagtgactggaactcaagcagatcaccgtggtcttgtcagcttgaggtgtcaggatgcagttgaggatgggacagtaactggaaattaataaggtaactcctggaaaggagagaaccacaagctggaaagtaactgcatttaaattattctcgaatccttagctgacccatgaattgtgtgtgcttaaagaagactccaaggaacctgctggaaagtaacagcaggaaggctgaagatttcagctgctgcaccccacagcagaggcagcatgtggagtttgaatcctgtccatcacaggggagaccgagtatagggcttcataaataaatgccttgagatttttaatgaaactctgtgtgtcatactttacaagtaaagacagtgtccttaaactaagaattccccctaagactaagggcaaagcagaaacaaactcactttaaacaagtgtaaaaccaaacctcctcaagttcatagtcatcagactaatttaactgtgtgatagaacaaaaattagtatcttctatgttctagataaatgtaagaaagaagaatctcattttctacttgaaaacacgaaaatttatataaatctcagctataaatgtaaaaactaaaactctgaaatacttaaaaagtagttgaacatcgttgagatctttggaaacaccaagatatcttaggacaacaaatgcactaaacacaaagcaaaaataacaaattagacttaatgaagactaaaatttaaaacttctgcttattaaaaggttccattaagaaaatgaaaagacaaaccacaggctggaagaaaatattagcaatacacatgtctaacaaaggacttgaatccattttttttttttttttgaggtggagtcttgctctgtcgcccaggctggggtgcagtggtgcgatcttagctcactacaacctccacctcccaagttcaagcagttcttctgcctcagcctcccgagtagctgggactacaagcatgcaccaccacacccagctaatttttgtattttcagtagagacggggtttcaccattttggttggccaggctggtctcgaactcctgacctcaagtgatctgcccacctcagcctcccaaagttctaggattacaggtgtgagccaccatgcccggccaagaatataaaagggatttttataactttttttttttaatgggcaaaagacatgaacagatacttcacagaagatataaaaatggccaataatcacatgaaaagatgttcagcaaatttgtcttcagggaagtgtacataaaaccacaataagagatcacacccgtcagtgactaaaatgaaaaagactgaccacactgactattggagagaaagaatgtggatgtaggtggatatgacatgtctcacataacatacatgcccccgaataagctcatgtttataatatgtagagttcttaagaaatattaatgaataaaggaggcaatttggaaaacaaggcaatttggagtaaaagaaatagaaataacccaaaaattggaaaaggatttcaatctcagtaaataaagacatgctaaatagaagtgataaatctcttttgtctacctaattggcaaaacatttttaaaaatagaatatgtcattttgctaaacgtgtggggtatatggtactttggtacatacttggtagaactgtaaattcgtataaacatgtttttccagtgtctgtcagatttaaagaggaattattcttctgacctagcaatactagttctagaatagtttgtcctagagaaattcttgttcttgtaagagagatacgtacatgtataagggttttgttttgtttggttttgtttggttttgttttgtttgagacggagtctcactctgttgcccaggttggagtgcagtggcacagtctcggcttactgcaaactctgtctcccaggttcaagagattctcctgcctcagcctcccgagtagctgggattacaggcacataccatcatgcccggctaatttttgtattcttagtagagacggggtttcatcatggccaggctggtctcaaactcctgacttcgtgatccgcccacctcagcgtcccaaagtgctgggattacaggcgtgagccaccatgcccggccaggagtttttaaagcatagttcataatagtgcaaacctggaaacaatcaaattgtctatcagcttttgttagttattcagaatatttgaagaagaaacattctggtataataatccttgggtaattaactttattatcacttagtttaaggcaaaggcaagaatataaagtcagatctttactttttggtgaggcatattcagatattgtaaaactgtattttggtttctcttttttcataagcagtgactaattttctgtgtgcatttatttatttgatgtttttggcctatacttatgcccacattttattaactacaagatagtatttggctataaagtgatttatgtaaaaaagtattcccaaactcaaggacttttcaccaaaaacatttttcgtgtgttcctttttcagtcttttaccttgctcagatttgtgctaattactctcctaagaatgtcagctgcaaacttttcattaagcaggtattaatctaagagaaggctgagtttctctgtgtttacttcaattcatcagattggggagaggtgattctggttggaacacagaacagtttaggatgttctgagttagaagtggtctttcccaaccgtacacacagagaagaaaaagaaaaggtgccaactgtcacctgttttttaacattattttggaacctagcattacttgtgaagaattatttttctacaatctggggaagaaatacaaatatgaggaacatagaattagtattattatttgctaatgatacggttgtatgcctagaaaacccaggagaatcagtcagtatatggaggcttataataatatcctcagttactttgtaatacgatttttttttccaaaattgactttttaatagacatttctgatttttttttcagttttcaggattttgatattcaaggatccagaaggtgcaatttggactggttgacaatagaaacatacaagaatattgaaagttacagagcttgtggttccacaattccacctccgtatatctcttcacaagaccacatctggattaggtttcattcggatgacaacatctctagaaagggtttcagactggcatatttttcaggtgtgtttttaaataagaaagatattgaactgaattttatggtattaactgctctgtcacttcggagctaatcttctaagtagtgttcatttaattaggagtaggcccttgaggcagctgagattgaggattagaagctaaagttagatgccctaaagctgggtctccaaaaggtgttttgtataattctaacaaaatgattaacttcatatactaaggttaattttctttttaaacatcttaaatacatttattctaagaatagccttttctccctcaagtgcttacgcatatccagaaagttacttcagaatgtatttttgtggtaattgtcattgtttttatacctccagagaaaagacctaacaaatttcaccttcatagtttatagtctcagaaaaaacgacatcttttcttttcttaaattgtgtctaaaaaacaagaccagatcatacaaatgtgaataattcagaattagtcctctcttttagatcaaaatgcaagatcttcatggaataataataagtatttaacaaattgaattgttgagtaagcatgccagtactaatttgtcattagaacccaacctgttaaatcattccatttataaagatacatacacacatacgttgattgcagcactattctcaatagcaaagagatggaatcaaaccaaatgcccatcaatgatagactgggtaaagaaaatgttggtacatatacaccatggaatactatgcagccataaaaaggagcgagatcatgtcctttgctggaagctggatggatggatgaagctggaagccattatcctcagcaaaataacacaggaacagaaaaccaaacactgcatgttctcacttataagtgggacctgaacaatgagaacacatggacacaggccccagatttattgtggcctttctagggagggtggggtgggagggagagcattagggaaaagacctaatgcatactggacttaatacctaggtgatggattgatgggtgcagcaaaccaccatggcacatgtttactcatgtaacaaacctgcacatcctgcacatgtaccctggaacttaaaattaaaatattaaaaaaccaacctgttttttaaaacttctagcacttgggctttatgaacatttattataaaaatatcacttgctgttttatgtcttttaaagattataatttttctccttctctttccatctatttctactcacatcttcacagggaaatctgaggaaccaaattgtgcttgtgatcagtttcgttgtggtaatggaaagtgtataccagaagcctggaaatgtaataacatggatgaatgtggagatagttccgatgaagagatctgtgccaaagaagcaaatcctccaactgctgctgcttttcaaccctgtgcttacaaccagttccagtgtttatcccgttttaccaaagtttacacttgcctccccgaatctttaaaatgtgatgggaacattgactgccttgacctaggagatgagatagactgtgatgtgccaacatgtgggcaatggctaaaatatttttatggtacttttaattctcccaattatccagacttttatcctcctggaagcaattgcacctggttaatagacactggtgatcaccgtaaagtcattttacgcttcactgactttaaacttgatggtactggttatggtgattatgtcaaaatatatgatggattagaggagaatccacacaagcttttgcgtgtgttgacagcttttgattctcatgcacctcttacagttgtttcttcttctggacagataagggtacatttttgtgctgataaagtgaatgctgcaaggggatttaatgctacttaccaagtagatgggttctgtttgccatgggaaataccctgtggaggtaactgggggtgttatactgagcagcagcgttgtgatgggtattggcattgcccaaatggaagggatgaaaccaattgtaccatgtgccagaaggaagaatttccatgttcccgaaatggtgtctgttatcctcgttctgatcgctgcaactaccagaatcattgcccaaatggctcagatgaaaaaaactgctttttttgccaaccaggaaatttccattgtaaaaacaatcgttgtgtgtttgaaagttgggtgtgtgattctcaagatgactgtggtgatggcagcgatgaagaaaattgcccagtaatcgtgcctacaagagtcatcactgctgccgtcatagggagcctcatctgtggcctgttactcgtcatagcattgggatgtacttgtaagctttattctctgagaatgtttgaaagaaggtcagtatcaagacagaactattgggcctcaataaaagcaggcccaagtgtttgaaacaagttctttgatgattagcaatgtatttttgttttatattagtttagaaaatggataaagattgttgatgatgtataaaattagcgtgaaaaacccgagactcagaaggccagacacattacaaactaaatatttagagttatgagaaaaagcccatctatttaccagctcctgttttcagattaatctgttttataggaatattgtaagctgcagctctcagttttagtgttttaacctgtatttttctaaatacaaattcaaaaattccagttattctatatgctatgttcaaagcatacaggtaaatagaaaaatgaataaggcataatatcacaagcagtttacagttaggaggaaggaattggggcatggaataagatgacaaaagtataatactataaagagctatgaaacaaaatggtataaagtcaaaaatacgtaatctaatgagggagagaggcagaaaggctttaattggaggggtgccacttgaaatgtatgagtagaagaatatagataggggaaaaggtgttgttaaagcaataacctaggaaaatatatagaagtaggaatgtccagcattgctcaaaaagtaagcacatgattcagtttatctggagcccaggatgcgtatgaagggctaacaggagatacgattggaacacaagactaatgtcctgttgtagagttaagtgacaacagcacttcagagttctcagttcagtaagaaatggttaactgttaaagggtgaccttcagagtgagtagttttcagtttgatgcaggataaatgggacctggcagaagttaatggcagagatgtccctgtggagacaatgaccttcagtcccaggagaattacaaataatagatttaacaactttttacgtaacagatggctaataggtggcacacagatgcacagtatcgtaataaccattactgcatcttttcttttttttccttttttttttttttgttgtttgtttggagacgggagtcttgctctgtcacccgggctggagtgcactggtgcgatctcagctcactgcactccgtctcccaggttcaagcgattctcctgcctcagcctcccaagtagctgtgattacaggcgcccgccaccacgcctggctaattttttgtatttttagtagagacagggtttcactctgttggccaggctggtcccagactactgacctcgtgatccacccgccttggcctcccaaactgctgggattacaggtgtgagccacggcgcccgaccactgcatctttggccaagtgtaaatggccagaaaactttttaccacattgcaacaaaagagcacaatgaagagtcaaagatcccagctgggcgcagtggcttcaacgtatattcagtaaatacagtattcttaggagtttttaaatcttgtattatttctccctttaccttttacagggattttcatttattaaaactcagtgatctaggcttctactagcataaagccctatgaagacagactgcctgcgtcagctttgtattcccactgtagggataatacatatattcagtaaatgtttgtcaaatgactaagctttaaaatgatcaaatatgccaagactcagattgttttaattactgataatagaaaattgttctttttcttcgctcccccttttaatcatttttctttccatctactctcaaagatcatttgaaacacagttgtcaagagtggaagcagaattgttaagaagagaagctcctccctcgtatggacaattgattgctcagggtttaattccaccagttgaagattttcctgtttgttcacctaatcaggtatattgcaatgtgtaatttctattacatttcctcttaaaatgaaatctgcgcctgtatatatgataaagcaaagacccttgactgtcagaatttttgcaatcaaggatttaaatgtatggaagatttgaagtcatagttttcattatagtttaacactacaaactgcaaaagtatatttttcattcctctgatttggttgtgcaattcttaagcattttactgtttaggataatttagtgcattataattcaaaagtattaagcttggcaaattattttttacttgacctgaacatctgcaagatttaagaatgaacactaaaattaatatgctagcaatataacatgctagattaaccacttataagtaaaagtaattaaaatgaagttaacatttctacctcaggaaaaacatcttcaagctggattttacagtgtttaacaatttatagcattttgtttatatagtaattcattatatgtttctgaattctttcaatttcttagcaattaaaaaaatttttctcgtagtgcttaaaaatgtgccagtgttcattttaggcataaggatttattcatttaaattgtaaattcattcagaaacatttataaaaactgttgtttccagtattataattaaaactggtaaacattgttttcccagtaatataattactttcaaaatagaataccatctcctttttggtaaatgtgagttctgattacagtctatcaccttattggagtattttaggaaatctttggtgagaatttgtagtttcaaaacatttctccatatgtaatttcctaagtaaatcattcagaagttccactgttggaattttgtgtgcaaagtaggaaaaacctaagttgtggcttctttatatcagccctgctatggggaaagtttttttttaggtaagaatcagatcacagttaattttacacacctacttcattctctaccacccaccatgcctaaaccccataaagttagagagaacacggtacacacaagattgtcttcactcctaacaccaattgcaaattcaaggagttccccaaatccccttcaggtttgataatttactaggaacactcaaaaaactcactgaaagcagctcacttgcgattacagtttattacagggagaggatacagacacagattaaccaagggaaaagatgcataggacaaagttcagaagggtaccaaacatggaccttccagttgtcctttccccatagaggcaggagggcattactgtgtgaacacagatatgtgacaatatgcatggagtgttaccaatcaggaaagctcacccaggcctcgggtgtccggagtttgtactggtgcactagcacataggcaggattaattgcacatgtggccaatcccagtttctagccttatccagagattgactgacccaaagccctcaccctacatgacactgttggtgtggttcagagcttccagtctaaatcagttttactatctggctggtccaaggcccccaggcaaagacactgctttcagacatgacagtggaagggcttggagatgatgtaccaaaagccaaggacagaggctttgggtgaggttaaattctttattacctcacactaccccagtttctcaggttatatgtaccctcgtgggagaattctacttcaacattttagaataaaatatgtttatgggtggtaagttagattgtattcatttaatgagattaaaaactctcaagtttgaagcttttggtaacaaattaccaaatttttatagcagattttggaaaaaataagtaatgatgtaattcaccatctcactcaaaggagaaacgctttttgaggaatgctttctccttcataaactgaagaagtatatgaaattattcctagaacattcgtgagatcccctcataaaatataatgttagattgccaatcctaattaactgacttttaactaaatagagagtttcacctcagtatgacaaaccaaatgttaaagtcagcaataaagtatgttgaaggcattgttgatcttgatggctaatagcagcacaacagaggataacagaagagccttttgttcattgctggacataatagcatagtgctcaacatgaagccttaaaacttgcatgctcactgttgaggagcagatctgtggagaagttcattataaatgtgaaccgctttttctttttctttttttttttaatttgtagttaggtacttcttaattggtgaaaactcttactcatctgtatagcaaatccatgtgtgctgatatccaaatttcttattgacaatctgtgccttactaatgttagactatgaaatgttcctatgatagtagcttcttatcataaattatgttcatggcactatggaagggcctatatggaaagcataaataaatgcaataccagtcacaaagagatacagaacataagaggacatcttccttattttctaccttctttcttctgtgaggggaaagggaagaggtgtgagttttggcaggagatggtatcatcaactgaaggagagtatatcaacttaagattgtttcctggaaatacaatttttaaatactaaatgccaggttggtgaaagctgtttcaagtttgaatacttctttttataaccactagatggagcttaaagactatcttatataatgctatatgcttttaaaaacaaactctaaactcgttcatctagaaaaaagaatagattttttattcagttggacaacctttcatgtacactaattacagctaactagttttcaaagaatgatatatttatacttaatactaaactatagaaaataaaactttaaagattaagaaggaatctaaatgtcgataccattgagtaatgatataaacaggttcttttgttgtttcttgttgtcttcggtgctgtattacaaatataattcctttatttgtgacaatataattaaatcctcagtatccattcagcaaatgcttgagaaccaactctgtgaaatacaattttcacatgttttggaaaagttaagccttgtaaattaaatctaatttgttctttaaaaaaaaaaaagataaaagtcctcgttttcacaaactcattttggtcacttcgtcaattatgtagagattctcctatgttcctagttacagaagtatcaattttattttctagctttggtacacttttcatgttggattacgatgtgagattttgaaacaactgttataatttacattaaatatcatttttaagttgcatatataaaatggaatatcaagaaaagtttaaacaaacaatgattcaagttagattagtagattagattctgtagtaggatgaacccacataggtaagagaatttaatttttccttcttagacccaaaagcaacaatgagtaacagaatttttaaccacaacacattcttaatagaagggtgtttttttttttttttatcttagtaccttgttgttaactatcttaagatcttttcttatttttgtaggcttctgttttggaaaatctgaggctagcggtacgatctcagcttggatttacttcagtcaggcttcctatggcaggcagatcaagcaacatttggaaccgtatttttaattttgcaagatcacgtcattctgggtcattggctttggtctcagcagatggagatgaggttgtccctagtcagagtaccagtagagaacctgagagaaatcatactcacagaagtttgttttccgtggagtctgatgatacagacacagaaaatgagagaagagatatggcaggagcatctggtggggttgcagctcctttgcctcaaaaagtccctcccacaacggcagtagaagcgacagtaggagcatgtgcaagttcctcaactcagagtacccgaggtggtcatgcagataatggaagggatgtgacaagtgtggaacccccaagtgtgagtccagcacgtcaccagcttacaagtgcactcagtcgtatgactcaggggctacgctgggtacgttttacattaggacgatcaagttccctaagtcagaaccagagtcctttgagacaacttgataatggggtaagtggaagagaagatgatgatgatgttgaaatgctaattccaatttctgatggatcttcagactttgatgtgaatgactgctccagacctcttcttgatcttgcctcagatcaaggacaagggcttagacaaccatataatgcaacaaatcctggagtaaggccaagtaatcgagatggcccctgtgagcgctgtggtattgtccacactgcccagataccagacacttgcttagaagtaacactgaaaaacgaaacgagtgatgatgaggctttgttactttgttaggtacgaatcacataagggagattgtatacaagttggagcaatatccatttattattttgtaactttacagttaaactagttttagtttaaaaagaaaaaatgcagggtgatttcttattattatatgttagcctgcatggttaaattcgacaacttgtaactctatgaacttagagtttactattttagcagctaaaaatgcatcacatattcatattgttcaataatgtcctttcatttgtttctgattgttttcatcctgatactgtagttcactgtagaaatgtggctgctgaaactcatttgattgtcatttttatctatcctatgttaaatggtttgtttttacaaaataataccttattttaattgaaacgtttatgcttttgccaacacatcttgtaacttaatatactagatgttaaggttgttaatgtacaaaaaaaaaacccttatactcacctgcgttttcatttgtttgacatttgtctattattggatttcattatcatatgaacttgtcagtgggaaacaaactgtctaaaaatttttctcttacgtttaacatacaatcatgtgaaatttaggcagagttcgataaattactggcaaaaacaaaactcttttataaagattttctaatgttgactttaatactctaacatggtacaaaccaaatggtaaaatcccaagtcatttcttttttcatctctatttagcaacagaattaagtggatgaagatattctactatgcattaaatcttgaactttataaaacatgtacaaaaattgtacaagataagttccacctggtaatgtctttccctaatacagggttgcgcttgcattggaccctagggatttgcactaaaattatatcaaggtctcagatgagcttagtgcacaagcactatcactttaaatactattatttgctaccacagcaactatatatttccatagcttttggctgggggcgggggacatttttattacaacttgaaattgctttgctggtttcatatttatttgttgtatttaaaaaatacattgttgtaagagtgattttttcaatatattttattcctgggggggatcatgctacactctcaaaagaaaattaagaaatcattcagatcatcccccctttttaagtagtgtgaattgcaaaacccaacatattttttttactgtcagttgcggtttatttattctttaactgtctgttttagtagtttaatgattatgaaaaatgtatctgtgtgtgatttgctatttattaaattttaagtactttgctgaatgtcattttaaagcatgtttgaagtcttgtgtatttgtctgtgttaatgctgtcaggaggaactgactaagatgttttaatatgtatcaaaaattaaaatgattttttttattgccttgaggtacttttt

SEQ ID NO: 121 - DNA, 4121 bp, Homo sapiens
ggtggctcggcggcggcggcggcggcggcggcggcgtcggcgtcgtctacctccagcttctcctccctcctcctccgtctcctcctctctctctccatctgctgtggttatggcctgtcgctggagcacaaaagagtctccgcggtggaggtctgcgttgctcttgcttttcctcgctggggtgtacgctaataccatttaaatgtgtaataataaggaaagattgctttggctatcttccagcttgtggagagactccagagcaaatacgagcaccaagtggcataatcacaagcccaggctggccttctgaatatcctgcaaaaatcaactgtagctggttcataagggcaaacccaggcgaaatcattactataagttttcaggattttgatattcaaggatccagaaggtgcaatttggactggttgacaatagaaacatacaagaatattgaaagttacagagcttgtggttccacaattccacctccgtatatctcttcacaagaccacatctggattaggtttcattcggatgacaacatctctagaaagggtttcagactggcatatttttcagggaaatctgaggaaccaaattgtgcttgtgatcagtttcgttgtggtaatggaaagtgtataccagaagcctggaaatgtaataacatggatgaatgtggagatagttccgatgaagagatctgtgccaaagaagcaaatcctccaactgctgctgcttttcaaccctgtgcttacaaccagttccagtgtttatcccgttttaccaaagtttacacttgcctccccgaatctttaaaatgtgatgggaacattgactgccttgacctaggagatgagatagactgtgatgtgccaacatgtgggcaatggctaaaatatttttatggtacttttaattctcccaattatccagacttttatcctcctggaagcaattgcacctggttaatagacactggtgatcaccgtaaagtcattttacgcttcactgactttaaacttgatggtactggttatggtgattatgtcaaaatatatgatggattagaggagaatccacacaagcttttgcgtgtgttgacagcttttgattctcatgcacctcttacagttgtttcttcttctggacagataagggtacatttttgtgctgataaagtgaatgctgcaaggggatttaatgctacttaccaagtagatgggttctgtttgccatgggaaataccctgtggaggtaactgggggtgttatactgagcagcagcgttgtgatgggtattggcattgcccaaatggaagggatgaaaccaattgtaccatgtgccagaaggaagaatttccatgttcccgaaatggtgtctgttatcctcgttctgatcgctgcaactaccagaatcattgcccaaatggctcagatgaaaaaaactgctttttttgccaaccaggaaatttccattgtaaaaacaatcgttgtgtgtttgaaagttgggtgtgtgattctcaagatgactgtggtgatggcagcgatgaagaaaattgcccagtaatcgtgcctacaagagtcatcactgctgccgtcatagggagcctcatctgtggcctgttactcgtcatagcattgggatgtacttgtaagctttattctctgagaatgtttgaaagaagatcatttgaaacacagttgtcaagagtggaagcagaattgttaagaagagaagctcctccctcgtatggacaattgattgctcagggtttaattccaccagttgaagattttcctgtttgttcacctaatcaggcttctgttttggaaaatctgaggctagcggtacgatctcagcttggatttacttcagtcaggcttcctatggcaggcagatcaagcaacatttggaaccgtatttttaattttgcaagatcacgtcattctgggtcattggctttggtctcagcagatggagatgaggttgtccctagtcagagtaccagtagagaacctgagagaaatcatactcacagaagtttgttttccgtggagtctgatgatacagacacagaaaatgagagaagagatatggcaggagcatctggtggggttgcagctcctttgcctcaaaaagtccctcccacaacggcagtagaagcgacagtaggagcatgtgcaagttcctcaactcagagtacccgaggtggtcatgcagataatggaagggatgtgacaagtgtggaacccccaagtgtgagtccagcacgtcaccagcttacaagtgcactcagtcgtatgactcaggggctacgctgggtacgttttacattaggacgatcaagttccctaagtcagaaccagagtcctttgagacaacttgataatggggtaagtggaagagaagatgatgatgatgttgaaatgctaattccaatttctgatggatcttcagactttgatgtgaatgactgctccagacctcttcttgatcttgcctcagatcaaggacaagggcttagacaaccatataatgcaacaaatcctggagtaaggccaagtaatcgagatggcccctgtgagcgctgtggtattgtccacactgcccagataccagacacttgcttagaagtaacactgaaaaacgaaacgagtgatgatgaggctttgttactttgttaggtacgaatcacataagggagattgtatacaagttggagcaatatccatttattattttgtaactttacagttaaactagttttagtttaaaaagaaaaaatgcagggtgatttcttattattatatgttagcctgcatggttaaattcgacaacttgtaactctatgaacttagagtttactattttagcagctaaaaatgcatcacatattcatattgttcaataatgtcctttcatttgtttctgattgttttcatcctgatactgtagttcactgtagaaatgtggctgctgaaactcatttgattgtcatttttatctatcctatgttaaatggtttgtttttacaaaataataccttattttaattgaaacgtttatgcttttgccaacacatcttgtaacttaatatactagatgttaaggttgttaatgtacaaaaaaaaaacccttatactcacctgcgttttcatttgtttgacatttgtctattattggatttcattatcatatgaacttgtcagtgggaaacaaactgtctaaaaatttttctcttacgtttaacatacaatcatgtgaaatttaggcagagttcgataaattactggcaaaaacaaaactcttttataaagattttctaatgttgactttaatactctaacatggtacaaaccaaatggtaaaatcccaagtcatttcttttttcatctctatttagcaacagaattaagtggatgaagatattctactatgcattaaatcttgaactttataaaacatgtacaaaaattgtacaagataagttccacctggtaatgtctttccctaatacagggttgcgcttgcattggaccctagggatttgcactaaaattatatcaaggtctcagatgagcttagtgcacaagcactatcactttaaatactattatttgctaccacagcaactatatatttccatagcttttggctgggggcgggggacatttttattacaacttgaaattgctttgctggtttcatatttatttgttgtatttaaaaaatacattgttgtaagagtgattttttcaatatattttattcctgggggggatcatgctacactctcaaaagaaaattaagaaatcattcagatcatcccccctttttaagtagtgtgaattgcaaaacccaacatattttttttactgtcagttgcggtttatttattctttaactgtctgttttagtagtttaatgattatgaaaaatgtatctgtgtgtgatttgctatttattaaattttaagtactttgctgaatgtcattttaaagcatgtttgaagtcttgtgtatttgtctgtgttaatgctgtcaggaggaactgactaagatgttttaatatgtatcaaaaattaaaatgattttttttattgccttgaggtacttttt

SEQ ID NO: 122 - protein, 666 aa, Homo sapiens
MDECGDSSDEEICAKEANPPTAAAFQPCAYNQFQCLSRFTKVYTCLPESLKCDGNIDCLDLGDEIDCDVPTCGQWLKYFYGTFNSPNYPDFYPPGSNCTWLIDTGDHRKVILRFTDFKLDGTGYGDYVKIYDGLEENPHKLLRVLTAFDSHAPLTVVSSSGQIRVHFCADKVNARFNATYQVDGFCLPWEIPCGGNWGCYTEQQRCDGYWHCPNGRDETNCTMCQKEEFPCSRNGVCYPRSDRCNYQNHCPNGSDEKNCFFCQPGNFHCKNNRCVFESWVCDSQDDCGDGSDEENCPVIVPTRVITAAVIGSLICGLLLVIALGCTCKKLRMFERRSFETQLSRVEAELLRREAPPSYGQLIAQGLIPPVEDFPVCSPNQASVLENLRLAVRSQLGFTSVRLPMAGRSSNIWNRIFNFARSRHSGSLALVSADGDEVVPSQSTSREPERNHTSLFSVESDDTDTENERRDMAGASGGVAAPLPQKVPPTTAVEATVGACASSSTQSTRGGHADNGRDVTSVEPPSVSPARHQLTSALSRMTQGLRWVRFTLGRSSSLSQNQSPLRQLDNGVSGREDDDDVEMLIPISDGSSDFDVNDCSRPLLDLASDQGQGLRQPYNATNPGVRPSNRDGPCERCGIVHTAQIPDTCLEVTLKNETSDDEALLLC

SEQ ID NO: 123 - DNA, 4123 bp, Homo sapiens
ggtggctcggcggcggcggcggcggcggcggcggcgtcggcgtcgtctacctccagcttctcctccctcctcctccgtctcctcctctctctctccatctgctgtggttatggcctgtcgctggagcacaaaagagtctccgcggtggaggtctgcgttgctcttgcttttcctcgctggggtgtacggaaatggtgctcttgcagaacattctgaaaatgtgcatatttcaggagtgtcaactgcttgtggagagactccagagcaaatacgagcaccaagtggcataatcacaagcccaggctggccttctgaatatcctgcaaaaatcaactgtagctggttcataagggcaaacccaggcgaaatcattactataagttttcaggattttgatattcaaggatccagaaggtgcaatttggactggttgacaatagaaacatacaagaatattgaaagttacagagcttgtggttccacaattccacctccgtatatctcttcacaagaccacatctggattaggtttcattcggatgacaacatctctagaaagggtttcagactggcatatttttcagggaaatctgaggaaccaaattgtgcttgtgatcagtttcgttgtggtaatggaaagtgtataccagaagcctggaaatgtaataacatggatgaatgtggagatagttccgatgaagagatctgtgccaaagaagcaaatcctccaactgctgctgcttttcaaccctgtgcttacaaccagttccagtgtttatcccgttttaccaaagtttacacttgcctccccgaatctttaaaatgtgatgggaacattgactgccttgacctaggagatgagatagactgtgatgtgccaacatgtgggcaatggctaaaatatttttatggtacttttaattctcccaattatccagacttttatcctcctggaagcaattgcacctggttaatagacactggtgatcaccgtaaagtcattttacgcttcactgactttaaacttgatggtactggttatggtgattatgtcaaaatatatgatggattagaggagaatccacacaagcttttgcgtgtgttgacagcttttgattctcatgcacctcttacagttgtttcttcttctggacagataagggtacatttttgtgctgataaagtgaatgctgcaaggggatttaatgctacttaccaagtagatgggttctgtttgccatgggaaataccctgtggaggtaactgggggtgttatactgagcagcagcgttgtgatgggtattggcattgcccaaatggaagggatgaaaccaattgtaccatgtgccagaaggaagaatttccatgttcccgaaatggtgtctgttatcctcgttctgatcgctgcaactaccagaatcattgcccaaatggctcagatgaaaaaaactgctttttttgccaaccaggaaatttccattgtaaaaacaatcgttgtgtgtttgaaagttgggtgtgtgattctcaagatgactgtggtgatggcagcgatgaagaaaattgcccagtaatcgtgcctacaagagtcatcactgctgccgtcatagggagcctcatctgtggcctgttactcgtcatagcattgggatgtacttgtaagctttattctctgagaatgtttgaaagaagatcatttgaaacacagttgtcaagagtggaagcagaattgttaagaagagaagctcctccctcgtatggacaattgattgctcagggtttaattccaccagttgaagattttcctgtttgttcacctaatcaggcttctgttttggaaaatctgaggctagcggtacgatctcagcttggatttacttcagtcaggcttcctatggcaggcagatcaagcaacatttggaaccgtatttttaattttgcaagatcacgtcattctgggtcattggctttggtctcagcagatggagatgaggttgtccctagtcagagtaccagtagagaacctgagagaaatcatactcacagaagtttgttttccgtggagtctgatgatacagacacagaaaatgagagaagagatatggcaggagcatctggtggggttgcagctcctttgcctcaaaaagtccctcccacaacggcagtagaagcgacagtaggagcatgtgcaagttcctcaactcagagtacccgaggtggtcatgcagataatggaagggatgtgacaagtgtggaacccccaagtgtgagtccagcacgtcaccagcttacaagtgcactcagtcgtatgactcaggggctacgctgggtacgttttacattaggacgatcaagttccctaagtcagaaccagagtcctttgagacaacttgataatggggtaagtggaagagaagatgatgatgatgttgaaatgctaattccaatttctgatggatcttcagactttgatgtgaatgactgctccagacctcttcttgatcttgcctcagatcaaggacaagggcttagacaaccatataatgcaacaaatcctggagtaaggccaagtaatcgagatggcccctgtgagcgctgtggtattgtccacactgcccagataccagacacttgcttagaagtaacactgaaaaacgaaacgagtgatgatgaggctttgttactttgttaggtacgaatcacataagggagattgtatacaagttggagcaatatccatttattattttgtaactttacagttaaactagttttagtttaaaaagaaaaaatgcagggtgatttcttattattatatgttagcctgcatggttaaattcgacaacttgtaactctatgaacttagagtttactattttagcagctaaaaatgcatcacatattcatattgttcaataatgtcctttcatttgtttctgattgttttcatcctgatactgtagttcactgtagaaatgtggctgctgaaactcatttgattgtcatttttatctatcctatgttaaatggtttgtttttacaaaataataccttattttaattgaaacgtttatgcttttgccaacacatcttgtaacttaatatactagatgttaaggttgttaatgtacaaaaaaaaaacccttatactcacctgcgttttcatttgtttgacatttgtctattattggatttcattatcatatgaacttgtcagtgggaaacaaactgtctaaaaatttttctcttacgtttaacatacaatcatgtgaaatttaggcagagttcgataaattactggcaaaaacaaaactcttttataaagattttctaatgttgactttaatactctaacatggtacaaaccaaatggtaaaatcccaagtcatttcttttttcatctctatttagcaacagaattaagtggatgaagatattctactatgcattaaatcttgaactttataaaacatgtacaaaaattgtacaagataagttccacctggtaatgtctttccctaatacagggttgcgcttgcattggaccctagggatttgcactaaaattatatcaaggtctcagatgagcttagtgcacaagcactatcactttaaatactattatttgctaccacagcaactatatatttccatagcttttggctgggggcgggggacatttttattacaacttgaaattgctttgctggtttcatatttatttgttgtatttaaaaaatacattgttgtaagagtgattttttcaatatattttattcctgggggggatcatgctacactctcaaaagaaaattaagaaatcattcagatcatcccccctttttaagtagtgtgaattgcaaaacccaacatattttttttactgtcagttgcggtttatttattctttaactgtctgttttagtagtttaatgattatgaaaaatgtatctgtgtgtgatttgctatttattaaattttaagtactttgctgaatgtcattttaaagcatgtttgaagtcttgtgtatttgtctgtgttaatgctgtcaggaggaactgactaagatgttttaatatgtatcaaaaattaaaatgattttttttattgccttgaggtacttttt

SEQ ID NO: 124 - protein, 849 aa, Homo sapiens
MACRWSTKESPRWRSALLLLFLAGVYGNGAEHSENVHGVSTACGETPEQIRAPSGIITSPGWPSEYPAKINCSWFIRANPGEIITISFQDFDIQGSRRCNLDWLTIETYKNIESYRACGSTIPPPYISSQDHIWIRFHSDDNISRKGFRLAYFSGKSEEPNCACDQFRCGNGKCIPEAWKCNNMDECGDSSDEEICAKEANPPTAAAFQPCAYNQFQCLSRFTKVYTCLPESLKCDGNIDCLDLGDEIDCDVPTCGQWLKYFYGTFNSPNYPDFYPPGSNCTWLIDTGDHRKVILRFTDFKLDGTGYGDYVKIYDGLEENPHKLLRVLTAFDSHAPLTVVSSSGQIRVHFCADKVNARFNATYQVDGFCLPWEIPCGGNWGCYTEQQRCDGYWHCPNGRDETNCTMCQKEEFPCSRNGVCYPRSDRCNYQNHCPNGSDEKNCFFCQPGNFHCKNNRCVFESWVCDSQDDCGDGSDEENCPVIVPTRVITAAVIGSLICGLLLVIALGCTCKKLRMFERRSFETQLSRVEAELLRREAPPSYGQLIAQGLIPPVEDFPVCSPNQASVLENLRLAVRSQLGFTSVRLPMAGRSSNIWNRIFNFARSRHSGSLALVSADGDEVVPSQSTSREPERNHTSLFSVESDDTDTENERRDMAGASGGVAAPLPQKVPPTTAVEATVGACASSSTQSTRGGHADNGRDVTSVEPPSVSPARHQLTSALSRMTQGLRWVRFTLGRSSSLSQNQSPLRQLDNGVSGREDDDDVEMLIPISDGSSDFDVNDCSRPLLDLASDQGQGLRQPYNATNPGVRPSNRDGPCERCGIVHTAQIPDTCLEVTLKNETSDDEALLLC

SEQ ID NO: 125 - DNA, 2465 bp, Homo sapiens
cccacataggtaagagaatttaatttttccttcttagacccaaaagcaacaatgagtaacagaatttttaaccacaacacattcttaatagaagggtgtttttttttttttttatcttagtaccttgttgttaactatcttaagatcttttcttatttttgtaggcttctgttttggaaaatctgaggctagcggtacgatctcagcttggatttacttcagtcaggcttcctatggcaggcagatcaagcaacatttggaaccgtatttttaattttgcaagatcacgtcattctgggtcattggctttggtctcagcagatggagatgaggttgtccctagtcagagtaccagtagagaacctgagagaaatcatactcacagaagtttgttttccgtggagtctgatgatacagacacagaaaatgagagaagagatatggcaggagcatctggtggggttgcagctcctttgcctcaaaaagtccctcccacaacggcagtagaagcgacagtaggagcatgtgcaagttcctcaactcagagtacccgaggtggtcatgcagataatggaagggatgtgacaagtgtggaacccccaagtgtgagtccagcacgtcaccagcttacaagtgcactcagtcgtatgactcaggggctacgctgggtacgttttacattaggacgatcaagttccctaagtcagaaccagagtcctttgagacaacttgataatggggtaagtggaagagaagatgatgatgatgttgaaatgctaattccaatttctgatggatcttcagactttgatgtgaatgactgctccagacctcttcttgatcttgcctcagatcaaggacaagggcttagacaaccatataatgcaacaaatcctggagtaaggccaagtaatcgagatggcccctgtgagcgctgtggtattgtccacactgcccagataccagacacttgcttagaagtaacactgaaaaacgaaacgagtgatgatgaggctttgttactttgttaggtacgaatcacataagggagattgtatacaagttggagcaatatccatttattattttgtaactttacagttaaactagttttagtttaaaaagaaaaaatgcagggtgatttcttattattatatgttagcctgcatggttaaattcgacaacttgtaactctatgaacttagagtttactattttagcagctaaaaatgcatcacatattcatattgttcaataatgtcctttcatttgtttctgattgttttcatcctgatactgtagttcactgtagaaatgtggctgctgaaactcatttgattgtcatttttatctatcctatgttaaatggtttgtttttacaaaataataccttattttaattgaaacgtttatgcttttgccaacacatcttgtaacttaatatactagatgttaaggttgttaatgtacaaaaaaaaaacccttatactcacctgcgttttcatttgtttgacatttgtctattattggatttcattatcatatgaacttgtcagtgggaaacaaactgtctaaaaatttttctcttacgtttaacatacaatcatgtgaaatttaggcagagttcgataaattactggcaaaaacaaaactcttttataaagattttctaatgttgactttaatactctaacatggtacaaaccaaatggtaaaatcccaagtcatttcttttttcatctctatttagcaacagaattaagtggatgaagatattctactatgcattaaatcttgaactttataaaacatgtacaaaaattgtacaagataagttccacctggtaatgtctttccctaatacagggttgcgcttgcattggaccctagggatttgcactaaaattatatcaaggtctcagatgagcttagtgcacaagcactatcactttaaatactattatttgctaccacagcaactatatatttccatagcttttggctgggggcgggggacatttttattacaacttgaaattgctttgctggtttcatatttatttgttgtatttaaaaaatacattgttgtaagagtgattttttcaatatattttattcctgggggggatcatgctacactctcaaaagaaaattaagaaatcattcagatcatcccccctttttaagtagtgtgaattgcaaaacccaacatattttttttactgtcagttgcggtttatttattctttaactgtctgttttagtagtttaatgattatgaaaaatgtatctgtgtgtgatttgctatttattaaattttaagtactttgctgaatgtcattttaaagcatgtttgaagtcttgtgtatttgtctgtgttaatgctgtcaggaggaactgactaagatgttttaatatgtatcaaaaattaaaatgattttttttattgccttgaggtacttttt

SEQ ID NO: 126 - protein, 129 aa, Homo sapiens
MKIFYYALNLELYKTCTKIVQDKFHLVMSFPNTGLRLHWTLGICTKIISRSQMSLVHKHYHFKYYYLLPQQLYISIAFGWGRGTFLLQLEIALLVSYLFVVFKKYIVVRVIFSIYFIPGGDHATLSKEN

SEQ ID NO: 127 - DNA, 7577 bp, Mus musculus
  misc_feature (1)...(7577): n = A,T,C or G
gtgaacatgaggaggaagaccctcaagtacctcaccttcttcctgctcttcatcttcctcacttcctttgtcctgaattactccaacacgggagtacccagtgcctggttccccaagcagatgctcctggaactctcagagaacttccgcaggttcatcaagtcacagccgtgcacctgcagacactgcatcagccaggacaaggtatcatattggttcgaccagcgcttcaacaagactatgcagcccctgctgacagtccacaacgctctgatggaggaggacacataccggtggtggctggtgagcagaatagggtctgggagtgggattgggggagtcctggggacccaccaagcatttgacagcattcagagtatcatccctgcccctccacccctcgccatcccttcactcagcaactgtttgtcgaaagtctattatggatacatcagagaaaagccctagtgggggttggggatttagttcagtggtagagtgcttgcctagcaagcccaaggccctgggtttggtcctcagctccggaaaaaaaaaaaaagccctagtggttttccctcctgtggctcccatcacaaatcaccatggacctggtggcttaagacatcagtggtagtcacaggtccccatcctggaggccaagagtccccacacccttgcttctctcctactattactgctgtggatgaaaatttgtggcacccccttgacccatgactgtagcaaccagtctctgctcccacatcccaaagtgaccctgtgtctctggtatcctctcatgggaagagtgtgtggccttggctctaggttgcacccccaaatccaggctagtctcacctgccaccaattgcagaactagatctgagcaggtggtatgaatgtgggaatcaggaaatacagtggtcttccgtgtctagggattggcctcagtcccttcctatatgcccagaggtgagctaacatcctggtctcacacacaaaaggtgcccagagaatacctgtagaatggataaatgagttttcttcccatctcttgtcctgggatgggggtggcagtcacctgtgtcttcacatttaatagctgggtttggtgaccagggagccagcgtgctcagctagaggcagtggagccacactggccattccctctgttctctcccccagaggctccagcgggagaggaaacccaacaacctgagcgacaccgtcaaggaactgtttcgcctggtgcctggcaatgtggatcctatgttgaacaagaggctggtgggctgccgacgctgtgcagttgtaggaaactccggtaacctgaaggactcctcgtatgggcctgagatcgacagccatgactttgtgctgaggtgaacactggacccgagcccacagttcctcagaagtgtgtgaaacaccttggctgagctcaaaaggccaaggttcaaggctggccgccctctgggtcttagtctcttcatcttttcttaccaaggtggactataatagagggtgttgctagagattttcaatgggctgggggacttggtacctaagatctattgcatggcaaaatttgaagtctggttctgtgactcagatctgccctcagctttcaatctagaccctgaaccagaagcgtttaatgcccactttgcttcttctgtcctcaagtggaattgtcatctcaggaaaaaggaccatacctcccttgagtttattgtaatccatactcagaatgttctgggacagagaacataattagaggtgggactcagtataccccccccacccaggtatcttctagaatctagaacaatgttatttctgtgtctttgacttcatgtccataggcccctttcctggctctcagtgtacctagtatcctgaggggatggccatgatgagaggcagagtcaggctcagggtcaggcagacctgagttcaaagctatcgtttggtagacagcttatctggataccgaaaaaggcacacctactaggttacccacgacatgggtggtcaatgatcggagagcaagacccacccaacttgcttttataaataaataactaaatgccttggcctctgttttgctggattagggatggaatttggctatgcatgctaggcaagctttcttcctctgacctggttacttcccacaccacaggctgcccttgaactcaccatcctccaggccgagccttccaagtagctgggatttcaaaccagctcgtccaggtctgtctggcctatgtctacaaggttcccattgtacacacggagaaactgaagcctagggaagaagggagtcacctgcagttaccacacaggtgactccaactccagcatccttactgagtaccctatttttctcctctcccaggatgaacaaggcacccacagtgggttttgaggcagacgttgggagccggaccacccaccatctcgtgtatcctgagagcttccgggagctgggagagaatgtcaacatggtcctggtccccttcaagaccaccgacctgcagtgggtgatcagcgccaccaccacaggcaccatcactcagtgagttcctctagggtctgccctatgtccagctgtctcatacaacgtatcactcctgctgggctgttccgtaaggttcctcttccccgtgcctcctggtacatatgtgacaggtcctaactgactggtcccctcacctcctagcatcatccatactccaaactttgtgctatagtttgcttccttcaaactctctggaatctcttagatgaaccccaggaaaggactcagcatgtggcagctccctgctgctcctcagtgctgggggccccctttgcagcatagaacaggcaggagctgctgagtgcatactttgtggctaagtcaacgattggctctccaacagtaagtgctgccatctgctcctcaggcatggcgcctatcatttgaaacttagcatctctcatttgatcctcccagcagtgcttctcattagctctggcctccagggagcaaccatagcaggggccaaaccacttgcccaacagtgaacttgacccagagcccatgcaaccatctgggtctaattcctcggtccctgacttttctcaaaggggagtggcttccatttccagatgtccacgtaactcctagtcctagccctggtctcccaggaggcagagccagagtcaagaactacgggttccaagaactccgtgcctccagggtaaagagtgcaagggaagggctcagcaagagattgggccaggcagctggctcaagattctcccctgatactctacagcatggagagcctaaattgcacaagttagattccatgtggtagtgcattttaaaccttgatgctacagcccatgtctgcttgcatgagctagagacagccataggtcacccgtgtcagttccccagcatcagcctgagccccactactgagcacagatgttctggctctggagaatggagtcaaatattcctaggcctctgaaaggctgtgctcatagcaagtctccattctggcccatcaagccatagaactttctctctttttttttcttggatattttctttatttacatttcaaatgtttcccctttccaggtctccannnnnnnnnnnnnnnnnnnnnnnnnnnnnnnnnnnnnnnnnnnnnnnnnnnnnnnnnnnnnnnnnnnnnnnnnnnnnncccacccaccccctcacctctatgagggtgttcccccacccacccactcccatcctcctgccctggcattctcctacactggggcatcgaatactctcaggtctgagggtctctcctcccactgatgtccaacaaggccatcttctaccacctatgtagccagtgccatgggtcgctccatgtgtattctttggtttgtggtccagtccctgaaagttccagggggtctggcctgttgacactgttgttccctccatggggctgcaaaccccctcagtcccttctccaatcggggactcccaagctcagtccaatggttggcgtagaacattctcaaaccatctagagtcacaccccgatggttctgctggagaaggagctatgctggggcaggaaaatggcttctcggggcctaagcctccctacccataccacactggctgtgtcactctccacactaaataccttaaatacctcctctttcccatctgcagcacctatgtccccgtgcccccgaagatcaaagtgaaacaagagaaggtaagaggcagcttgggaccttcctactctgccctgatttttccaagatttggtgctatgatggtgcactgggccacacagagtgcccaggccctgggcatctttgctgctaaggacaggtctccaaagtgcatctccagaatagcagaactacctgggaacttgccacaaacatgaccctctaggagtacccagacctactacagccaacccagggtagcaccctggagggtgaaggcaatataagctttgatgttgggtattttggctttttgttttgttttgttttgttttgttttgttttgtttttgagttgttcctggaagcttctcaaagccacactcccctctctctctattctcaccctatcctttccagtgagtctttgttctgcactggcccagtcctgggcaaaagcaaaaacagtgcaaaaaccccaccatatactgtcacacttgaggaggctcagagagggccagtaacttgcccagggacatagcctacctcgatcatgctaggactagatgaagtccctgtgtgcctgcgacatgctgaccttggccttgggcaccactgtcccagaaagaagccacaggcatcttctagagtgggtctttctgctatgaccccagtaaacctgaagcaaggctgagaaacaaagagccctccagagacctgcctaaatcctttgttgctcccaaagtccccttcactgtccccaaagcagccacaggggtcaaaaccaaggccatgcctgtcacagggagacctccctggatgtgtaacactaaacctgctgcttagcctttctgagccctagtgacttcattaggcgaagaggaaagccttgcatagagtttgccttaggtcagagttttcagtcagtgccaagcagaacaggtggcccatgggtacattttttaatgcagcatgacactgtgatgattcctcacactacttcttggaacacttctggggtcttgggtcacactccctgtccccataggatttttatttcagtaccactgtccattcaaggcttcctccagtgctatgaagctcttctgggctggttcttgcctgtggcccacatcactcataatatcactatagatatcagcaaaatatctaaagtgtccccagcactaaatccataaatgcaaaggtgtttgttagagcccttcatgaccatatttttatggccacaacagtgtggcacccactagatgctttgtgtcttttgctggctgtactcacccagtctattcgccctgtagatcctgatctaccacccagccttcatcaagtatgtctttgacaactggcttcagggccatgggcggtatccatcgactggcatcctctccatcatcttctccattcatatctgtgatgaggtatgtcaccccacctccctgcagaaacaagggctatcaccccatgtttccaggggagtccagggtaggggagaggggaaaagactgtttccaaccacgtctcctcatgtatccctggtacctttcttaccaggcatgtgtaagagtgtcaactgtatgatatcattctcaagagcagaatttcagactcattccagggaagggtggctaagctctgattcagctcaaaatgaagaagcagattctaaatagcttagacaagggagagctacagaggccatagttaccagccccagcttgcttgttagagccacccagggatccacaccctgacccgcacacattgctaggaagccaaccaggtctactgggcttccactacccaccaagtgtgagaaccagagtgggacttcaaagacattgcttccatctcttatctccaatcccacccagagatccctgctgcaaggcaggcctgtgctgagaaaccaaatgtcactgaactgcgctgtcccagctctgttgtgcacacccctctctagctccagtctctcctccaccatgcaagtagatgctgtgcccttcatttaataatgctcatctgagtgactccatattcgtctcactatctactcactaagacctaactcaaatgtcccctcttgcaaagaacctcccatcaccttgggtctatggtctctccttggtgccctagagaccctgaatttaacccctgactcttgaagtaacattctttccatgaattccataagttgaaaaggttgagacctgataggtgtgtccctgatgtctccagggacccgatgtgcctgctaggtagcaaccaaagaaagtaggcctgcctgcattttgacttgtcagcccattgttaggtgcacaataagtagtcatttgtgttgtgcaagggccccagcatcagacattggcctgggaaggaagtgtttagaagctgccacctaccttctgtggccatgtgtcttggcctccgtgccagatgaggaaatgaggttctgaaatgatctgatgtgtcaagagtcagcttggatgacgaatgatttgcctgccttccaagcccctttccccatcttctctctaaaactcctaagggctcctgtagaggccctgcccaccttaggaccacccatgtgaagtcaccccacattgcctttgggctggagttagacttgggccttacatggcttgacttggctggacttggctttctaaagaaagtttctatgaatcattaatatttaacatagaatttcaagggcaaacacaagctacctttcctatttcccctaccctactaccatggtcttgctatatgggtctcaccttggctttgcccccacaggtggacttatatggttttggggcagacagcaaaggaaattggcaccattactgggagaacaacccatcagcgggtgccttccgaaagacgggggttcacgatggtgacttcgagtacaacatcacaactaccctggcagccatcaataaaatccgcatcttcaaggggagatgatgctgcgacccattaaggatggacacaacacatcacacctctcaatttgcagccccaacatctcccaggagccagtgtgttccagacgcttccggggctgaactcggggtgttcccaggctttctggcagccccttgcaccctcatgttgttatcatctacttagcaaagttgtccaactctcccaggatacagagccagtctcgggcctgtctacagtgggagcactttcccaccgctgtcccctagctggggaaaagcgagccaataccaggaaaggtctagcctccaaacaagttattttgtcttctgagttggattggagggaggggatgggagaaaataaatcctgaagattcttatgttc

SEQ ID NO: 128 - DNA, 1386 bp, Mus musculus
gtgaacatgaggaggaagaccctcaagtacctcaccttcttcctgctcttcatcttcctcacttcctttgtcctgaattactccaacacgggagtacccagtgcctggttccccaagcagatgctcctggaactctcagagaacttccgcaggttcatcaagtcacagccgtgcacctgcagacactgcatcagccaggacaaggtatcatattggttcgaccagcgcttcaacaagactatgcagcccctgctgacagtccacaacgctctgatggaggaggacacataccggtggtggctgaggctccagcgggagaggaaacccaacaacctgagcgacaccgtcaaggaactgtttcgcctggtgcctggcaatgtggatcctatgttgaacaagaggctggtgggctgccgacgctgtgcagttgtaggaaactccggtaacctgaaggactcctcgtatgggcctgagatcgacagccatgactttgtgctgaggatgaacaaggcacccacagtgggttttgaggcagacgttgggagccggaccacccaccatctcgtgtatcctgagagcttccgggagctgggagagaatgtcaacatggtcctggtccccttcaagaccaccgacctgcagtgggtgatcagcgccaccaccacaggcaccatcactcacacctatgtccccgtgcccccgaagatcaaagtgaaacaagagaagatcctgatctaccacccagccttcatcaagtatgtctttgacaactggcttcagggccatgggcggtatccatcgactggcatcctctccatcatcttctccattcatatctgtgatgaggtggacttatatggttttggggcagacagcaaaggaaattggcaccattactgggagaacaacccatcagcgggtgccttccgaaagacgggggttcacgatggtgacttcgagtacaacatcacaactaccctggcagccatcaataaaatccgcatcttcaaggggagatgatgctgcgacccattaaggatggacacaacacatcacacctctcaatttgcagccccaacatctcccaggagccagtgtgttccagacgcttccggggctgaactcggggtgttcccaggctttctggcagccccttgcaccctcatgttgttatcatctacttagcaaagttgtccaactctcccaggatacagagccagtctcgggcctgtctacagtgggagcactttcccaccgctgtcccctagctggggaaaagcgagccaataccaggaaaggtctagcctccaaacaagttattttgtcttctgagttggattggagggaggggatgggagaaaataaatcctgaagattcttatgttc

SEQ ID NO: 129 - protein, 335 aa, Mus musculus
MRRKTLKYLTFFLLFIFLTSFVLNYSNTGVPSAWFPKQMLLELSENFRRFIKSQPCTCRHCISQDKVSYWFDQRFNKTMQPLLTVHNALMEEDYWWLRLQRERKPNNLSDTVKELFRLVPGNVDPMLNKRLVGCRRCAVVGNSGNLKDSSYGPEIDSHDFVLRMNKAPTVGFEADVGSRTTHHLVYPESFRELGENVNMVLVPFKTTDLQWVISATTTGTITHTYVPVPPKIKVKQEKILIYHPAFIKYVFDNWLQGHGRYPSTGILSIIFSIHICDEVDLYGFGADSKGNWHHYWENNPSAGAFRKTGVHDGDFEYNITTTLAAINKIRIFKGR

SEQ ID NO: 130 - DNA, 113079 bp, Homo sapiens
cccgggggaaggtgttcccgagccctctcccaccctcatcccgcctcctcgcttcctcggctccagcctccgccggcggagcccactatgccagacagtttcgacactttgcaaagacaaagagccctagaccggagggaggaggaggaggaagaagagcggagagagaaggaagaggcgatgtgagctgggaagggggcaagtgtccgggacacccacacccctgtattctcctccgaaccccttcatgcccaaatcccggaaactccagcgtgtctccagccgtggtgagtgcgcgcgcggaggcgaaccctgctcggggtgcgcgggggctgcgtccgcctgagttggggctcgggcagtttcctgtggattctcggagtggaaggttgattgtctggacccgggaactgaaggggtggggaggggactaggagggtgtgacagtggagctgggactgaagaccccgggattctagtggaagacattcgaagggagaccccttccttggcagcggcgaccacccagggctttgggagaggaagaaggtcggggtggaggttcgggcttaggggtcttcggccgacactggaggagctgcctggagctctgtggggaacctacgccaagtcccgggcagcggttcccgaaagcagccccagtgacattgcacccggcgccgggctgggatctcctccgctggggccgcccgtgggaggagacctcgctgggtggccgggctcaggcgctctcgagcggatttggggtcacaggctgggacaccgcggaggccgccagtgttctggacgagcggccgtgggacagtatccggatcgagtcccccaatccgctgcaagcaggcgcagatccgggaggtggctatcggccccggggacgccgtcagagcgcgctgctccggatctgggggtgaagttgacacccgggacaagagagctgaacgcggcgtggcggacagtgggggacgcgggtgggccaaggagagcacggccggagtcgtgttagtggcaactcgaaactctgaatccgccccaaccccgtgaggcgtcgcagctcccaagaaataatctgacaaaagttagcaacttgcctgtgtctctcgtgtgtgtgacctgcgtgggggcagggccaccccttctgggagcgcacggggacggacagcggtgaccctggggcgaggcgctctggtgagggtacagttagtttggaatcgggacggtggcgcaactttccgctcctcctttctctgcgcgagtgtttaagcgtgaccttgcgggaggaagcgcggctgaacttgagatgggggttgagcttgcgccccggcttggcacagagacgtcggagcgcgcattagcctggccttgcagccgggtctcccaggaagcgtgtggggatcgtctggctctgctcgtcagctggagccctgactcgctcctccctcctacgctagggtcctcggcggccgtaccatgcgcggggctcggtggtgtgttgggcgaggggacacgtgcgcacccagaagcgcgcaagggggtgggggttgggcaggtcactgcgtctcgcgggctgggcgagtcccgcagagggagtcagccgtgaccctgagggcagtgactggctcgccgcgtccctgcatcaggcattcgcccggctttctcgtgattgtttccgggcacccctggcctctcccgacttctccccctcgcgggtccccaagccccgcaagtttgcgacgagctggttctccagggagacagcgagcgcccacccccgctctgcggctgggtgtgtgtggtgagaggaagagacgggaggaggaggcgaggccgactcgccaacgaggaaaacggggtgagaggggagccgggttttccaatagtcgccagggcgcctggcacgtcgtaggtgctaacgcagtgttcattgacaaggccccaaggtggaaggtgctggcaggggcccggacgcccccttcttcccttccagtctctaaaatggagttcaaatgtatcgaccaagccctttaggcttctagacgtgcctggagcacctactacgtgcgggggctctactcctggcctgttcgtagaagctgcgggcggagcctcctgattttctttaccccgcgctgcccaagcgcccagaggcttcgaaaaggcaaggtgcactgccccctgccggctgctgtggaaactgccgcttgtctctgcggtggggaaggggcgcccagtgcgggggtccctcagtgccttcccgcacctccccttcctgccccaaacattaggacccctgccggctgttttctgaaatcccatggttggctgaaatgactgactagagttcaccactccgtgcccctcagcctctgccaatatctgggtacagcgtggggcctcttctagtctcccgtctctctgtctctgtctctctttggtcgccagacttaacctctcggcgtctcagtttctatatctgcaaaatgaggccaataatacattctccaaaatacgttctgcataattgcgagtggcgataatacatataattaagtgaatgtgtgtatgtataggtagttcatactctacatgtgtgtatgtgtataccttgacttcaggtctagggaaaaaagttccatcgtacactttttgctaaataaagaatgaatagagggctccttctcctcttgccttttcaaaatcccacaaaccctgaagtttgctttccctgcatttttctgggccggcatttgctgtttagagtctgattggacaaggccaggacctgggcttgagcagggcctttgttgcctacctccctggctgggaggccacagcaccccacccagggtgagagagaaaaacaggaagcgttgctagaagtgatggcagaggagggtttcttagggagtgtggagtctgttcctcgaagctctgcagcagcaggcggaaactgccttctgagcagccttcttgctgattgtaatcagggctgtactgccccccttccctggtggcgctcacagcattggctgtcgctgatctggaagcccttcttatggggatgaagtcgtctgtgagcttgacaggaaggagtccttctaggtcctgggtctttgggggtgaggtagatctctgtctcccctccccaccaagcagcccccgagccaggacaccacccaaaggcaggcagttgacattacccaaggaagggccctctcccatgtgtgactctgaggcttctggtcaggtaaccttgcttgagtcagttcctgtgtagaaggttgctgactcaaagggtttatatttgggtagagctttggccagggatctaaacattaaccctcactctaggcccctcccacaccaccaaaagcgaccaggaaagcaaaaaataaaatccaccagccatcttgtaaaagctttccagtgagttctgcatgcctgtgtgcatacactccacaggctgatggaagagctggcccggtcacaaagaattctagaataagacttagatgcagcttcgttccgttgtgtagactttgtggaaacttcagcatccctgctggcacacctgaggagctgagagctctcttctgctctaatttggtcacaggagcccagaccggggccctgtgagagcctgcatttgagtcccagtggcagcgctcagttactttgcaacttggctcccaaactattccaggctctgggtctcagtttcactctcaaaataagaggcttggctgggcacagtggctcaggcctgtaatcccagcactttgggaggccgaggtgggtggatcatttgaggtcaggagtttgagaccagctggccaatgtggtgaaaccctgcctctactaaaaatacaaaaattagccgggcatagtggtgggctcctgtagtacccagctactcaggaggctgaggcaggagaatcacttggacccgggaggtggagattgcagtgagctgagatcgtgccatggcactccagtctcggcgacagagtgagactgtctcaaaaaaaaaaaaaaagagagcaaggctttagagttctgctgcccgtcactgagggtccattaaaagcttctctttgtgaagacagccaccacctgatttatgtttgcttcagccagcatcatcctcaaaaccctcccggtatcacagacaaccctggcttggggcagctggactgtctactaccccatgccaagggcatctcccctctcaaagagtggccaggaccattcggagcccacacccgcttggcaaagtcattttctagcagttctcaacgctagattttgaaagcagtcccagaagtttcagactctgaggtctgaaacctgacagagccagggtgccatctgtggggactcccaaatggtacatattgcagaaggaaccccagtgatctcaccagggcctgttttgcttcccatccacaagctgaacatgaccttagaaatcactttggtcagccctttcactttaatgtaaaaatattgaggctcagaggggaagtcactggactgtaaaatctggggttttattgtttatttggtcttgttattggtggtggttgggttgttttgatttcagttgagccaacatttactgggaacttattaccttccaggagcaccatgcaaagtgcggagatgcagagaggaaagactactcggtccttgttccttgctgtcccagaggtcacagtgctgtggggagggggacaaggacataccctgtcaggctgcgtatataaatacacaggtgctaagcaaaatgggaacggagaagggaaaggttccctccaccttgagagacccacagaagggtgttctagagatggatgagtcagactgcaagagagcaaagatatcttcctgaatacattcaatatcaaagcatcatgtgccctgtgtgtgcaaaataataataatcataataataaagtaaaataaaagattggctgtaagcctgttccacatggttctgaagaggtaagggaattgggaattttagaggttcagtgctttggccccatttccctccttaggtcctgatctctggtttgtttgtgtgagaggaatggttgccttgcagccagcctgcaagttcctacaccatgagagcctccaagcattggaatgcccgtgtataaaacagagagtggctgctttgcatttgcctttttaaaaaaataaaataaaacttagtgctttatttttaatgctcatccgtatactttatctcagattttcatagctgatttgggagggtggcatggcaggtggcaggtaggagaaagcgcccaggttttcagggggacgctactatccaggccggctgagtgagctggagcaagtccctgcatttccgtgagccaggtttgaggtgcatgtgggtgatcaccccctgcaatgcgggggatgcagggcccccaggaggattaagggagaggattcttgggagagttgtgcatgcgggagtcccagagcctccttgattccagttgcattaagtctgtttataagagaaagtgatcgcattcctcaagacagagcctacgggagacagaggagttgactgaaggcaggaagttttggaaaactcctggaaaagcacttgaagtaggaggaggctgattttaaggtaaaatggtttgtgaatgatccgcctggaagcagtaaggcctaatgactgtgttgggggagcatgctcctctcattcctatgggttgtgtcaaacttttggcttctttgtccctagggcaggacacagcattactagttagccagaaccctggcctaagaagccacccaaagcactgttaccaggagcagagacacacaggggaggtggggggcagcataagatggtcggggtgcccagcatcataagccacctggagggagcccttcctatgtggcctggctggccagcagggatgggatttgtgtcaaagttcaaggcacctgcagtggacgctattgtggttcccacctgggacaactgttagagagggctctggagttgaggtgttttctacagagtcaggggaatccctgcagggaaaccactggccaaggacacagaactcctgggccctggccctggccctggcccatctgctccgggctggggaccttgggcacgttgtttaacctctttgacccttcgtttcctcacctgggagatggtagtataaattcccactccctctgttacaggagagttaggaggaccccacaaaatgaagcacaggaacctgccttattgataagaattttagtagcatctactttttatagtttaatgtacacccagtagtgccaagtattttgaacatcttatcattctggggttcagcaggaagcattgaatggagggtctgaataaagatgtgcttccagagatggtgcccacattcagagaagtcagcaggggatgctgtagcacctgggcccatttaccacccccagaagaagtggcacggtaggggaagggctaggggaaccaggagagcatcgcaatagttgccagaagcctctggaagagagagaccacaaggccccctcctcaacttggcaggagaggagccaggcggatcaaccctgcaaccttgctctcctctgtcctgccctctgcaactctgtggcaccaagagctgagcccacccagcagccaaaggcagggagctccctgatggagccccccagggcaggacaaggtggaggtggattaggagcaggcctggaggagacacacacacacacacacacacacacacacacacacacacacacacaggcacacagagctgttatctcatttgaatctgcaacagctgggggtggggaggagtagtcacaagattaccagttggcaggtaagatgcccaggaactggagggtaacccccttgcctaaggccacacagctggtgggagcccacattttaacccattgtgtcttatcagccctagtaaagtaagaagatccattgtaagacattatgaagaccttcaattgttatcagtagcatcttaatgagaagcagaatagtttaagtgttaaggtttgcctgggtttcaattggaggtttattacttagtgatcaaattactgaccttttctatgtctcagcttcctcttctatcatgaaggcacactttgtacagttgatgtgaaaactaaacaagtttattcagtaaaggtctctcaacaaatgttagttttgattcctgagaaggtcaagatttagacagggcggtgtgggtgtgagtggtacttcaacatggccttttaacctattcagcattcaaataatatggtttgaatatttgtaggttaaaagtttctttcttccagttattctgacgatgtttgtttcatttcttctgactctgtgtgtgtgtgtgtgtgtgtgtgtgtgtgtgtgtgtattttctctttaaaacacatgaaagtgccaaaggagagaatgacaagaaatttaaagacctaaattggctttattgtgattctagaattgagcaacacttcgttccacaaaacaaacagaataggttttccagtgagctgagcagaggaggttggctttataaacaggactgaagaaaccagaagcaacaaagtgtgtactcattacatttagagagaacactagaaaaataactgattagttaacatccggttactttaggctgcctttttttgtgctaaggattaaagccgagagaacttcatgatcataccagttgacaatttaatcctgcttatttgagaaattgactctctcttgatttctcaggaagtcagatgacaacttagttttgtcgatggctgttgtaaaacctcggttcttgtctccttagtttaaaagaaattaaacaagagacacacagcaaaggagatgcagcatggagcgatttgttgcaaaagaggcaggatattctgaaagtgacgtgcagaatagacagtacactctgagacaggattcagggcgggctgctcgtgaggatgggacagcattgacttactggggagactcccttgatgacagccttacacggttattcataaggaggcaggaagaggcgctagcagtaagcatgttctgggtggtcttcggggtgcacatgtgcagcagctgtacctgcttgcttgtatgttacatgtctcattaacatctgaaatctccacccgggagtgtgttttttactattataatgagcaaaggttcagtctgaggacaggtaaaatcaaaatgtgcaccctcttacgggggaaattccttactggagctagtttggcttgagtgaactggactacagtgtgaatgctggcgcttatcgtgttgaccctgtggtcgccatgccacggttgccacatctcgaggacatggctccctttttgactacctatcccgcctcagtttggatttggggacctggaactttagcgtgggtaactccattttgattctcagccggccctgttggggcctagtgcggaaacttagtccaaaacaatggccttctataatttttattaaacaaatcctatgtaatcatgtatgattctaaagcccttaatggagtataaaatatgacttaaaaattacttgcaataattcagaaaagttgagaagaaaagaacattagctccaaattatttggcagaattaaaaagagggttacaagtgacttttggaaagtacacattggggtgtacaaataaagtactttctctgaatttcattagctacattaaaaaaagaaaagatcaaatgcaatagatagcactgtaatagattttgctacattaaaaaaaatccatttgaatacacagtgaactaaaacaccagagtggctaaaaagtcccttcatgcatatttacttagcagagagctcttgagaaagacccaaccaataaaccccaaccaaagcaaatccagctacttctctagctgagagggtggaatgactccaaaatattgtttcaagctcaaaaagcctaaaacaactccacataaaaaaacaaaaatctatctaattggacatttacctttttggaaataaaaggcccagtgggaaaaaaaaaaaaaaagaaagaaagaaaggaaggaaggaaggaaggaaggaaggaaggaaggaaggaaggaaagaaagaaagaaacccttttcttagatccttagaagactcgactggagcccaaaataaatcccctgaattggccaagtattaaaggactctattctccttccctgcctttagtgtgctggagccctaacaagggcaaagaactgccagtggtcaagagctcaaacacccggaacaacccagcgacattcacagacaccagcaactacagccctgacccgagttggccctcagttcaactcttctgacggtcctcctgattttgcagataaagatgtggattcaggccaggccctgtggctcatacctgtaatcccagcactttgggaggctgaggtggccagatcacgagatcaagagatcgagaccatcctggccaacatggcgaaaccccatctctactaaaaatacaaaaattagctggacatgatggtgtgtgcctgtagtcccagctactcgggaggctgaggtaggagaatcacttgaacccaggaggcggaggttgcagtgagctgagatcctgccactgcactccagcctggtgacagaatgagactctgtctcaaaaaaaaaaaaaaaaaaagatgtggattcacaggggagaagtgacttactggccaaggtcacatgggcctctgcctccagatcttctgtgtgtctgaaattatcatttctacttggtaggtctctctttttttttatttttatttttggagacagggtcttgctctgttgcctgggctggagtgcagtatatgatcttggctcactgcaacttctgcctgctgagctcccacctcagcctcctgagtagctgggactacaggtatacgccattgtggatcactcttggtgaagggataagcccagaccttcaccaaccttgcagttctatcacagtcgtccttagtttatgcctttagagtccccatcaatcacccttcccactctgaactgtagagaggtacacagcacagtgagttgacttgatcaacatctggtcgagtgtctgggaaatggcagatctaggccttgagccctggtagagctacctcgcttcattcccagcaccccagtaccttactgcctccacctcacccccgtgctccctccttggctgagcgtgagaacagtggcaaaaaaaacaacataaatctaagtctctacatcctcattagatcctagagtcagctgatggtgcccaaattatcatcacaacaatataacgtaacataacataacacaaccaccacgaccaccatttacagttcatgtgaaataggagtgaaccggaaccacaagctgacttggccaagaaccagctttagcattaggatgtcagagagctcagctgccacctgtgagactgaggggaggcagtggagggttctgatggtgagacccaggtatgtgtgtctcagtggaacctccagaaagctcaaggaattcatggcactcggagacatgtagttgggtggtttgcccattgtttagttattgtgcatgtaaatccttttcttgcagaggtggaaatcagcttctaaggagatggagtcaaagtcaagcaacagaggccagaggggaggaaaatcttgcagacggtttgggaacaggggatcttgcttgaaattttttggggcaaactgattaactggcagcaagcaaaaaaaaaaaaaaaaaaaaagatggctctgggcaaaccttgagtaaggcttcacagaaaataatttcagttgattgcattttctagaaaactttaagagtttaactgtgcactctacgtgacaggctgtctgccctccacctgggctgggctgcattgcctacttcccctcattagaatttctcattcgtttactatgggagcctagtctttacagtgactctctgtaaagtgtatgtttccacttttttcttaatcccattttatagatgtggaaaccaaggttcagagaggttaagtcacttaaccgaggtcacttagctcgaaagtggcagaaccaggatttataagtgcaccatttctgtctgaagcctgagacctcaggcaccatgcaacgtaattcccaagtcatcctatatccctggctaagtggggactctggaagggaagggcagcttctctaaggttcagataggaaactagtcacaccaggtgcctggcccccagcccagcccacgagacgtgctgtgaccacctgggccctctggtgaccatgaacccatgctctgtaacatccttttgggcaggagttcctgactgttctccacctggtgctttccaggtctcacaccagcagcttcattctcccaaagcctggggctctgagtcttctccccgattcaccatcactgggtgagtccgtgggtttatttagcctgttacattctggctttattttcttctaagctgctaaattcatcataatttattacacagcaatagataatacacatgaaatgcaaatactttttctgttataagttgtcatgctgatggaagtgatggtatttcagtgtgtttttttttttagtaaaactgacacatagtaattgtacatatttatggggtacgtagtgagttttcatacatgcaatgtagagtgatcaaatcagggtaatttgcatatctgtcacctcaaacattcatcatttgtgttgggaacattcaaaatcctctcttctagctatttgaaaatatgaaaatatattataaatccttgtttactatagccaccctgcagtgccacagaacactagaacctattcctcctatctgtaattttgtttcctttaactgctccacatccgtccctgcatggctgcttgcaagaactcatctttgtggcttgttgttataaattgaattcgaagagccccaaggtgcctggggattgagggaggcggtgagccactttgagcctgccggggggtttggagaaaggactgagcaggaaggctgagtgcaaagtttgcaatcaggcgtgtaaacttagccagctccctagctagatgggagcctcttggaggcaacctgcttcacgtaaaaggaatcgtcagcgtcgctgttgcaaccttggaaaattcccttttaataacatcttcacaatggagagaaaggtttgttgttcttcttcttacttgaaaacactgttaatcctaccacctggtggagagtttgatgaataaagaccgttgctcaggaaacatgttagctgccacgaataggaatgtctttgtgaggtgtattactggttgtttctaaaacataatcttatgttttaaaattcagtcttttggcaaaaaaaggaaattaaaatgaaagggagagattaggcagacagtaccatcgttctttctttcaccacctgatagaagcttcaaatggaaaacacacctttcagaatgggttgaagacctggttccaacctaaggtctgctgctattttctgtttctccctgcgacctggaacaaactgagctcagcaaacatgatccttggaccacagtaagtcctcatttaatgacatcgataggtccttggaaattgtgagtttaagggaaacgacataaaaaactgatttcaccatagggtaactgatataaacaagagttaagtatctctgatgtatttctgttcataaaaatatcaccaaacttctaaatgaaggccccaaacagcatcgcaggtggccacagcctgtcccagtggcttaggacgtgcacacatgcacacacacacacacacacacacacacacaaaaccacactctatcgccctgggaccacataaacacagcagttcacctgatatgcacagctttttggggtgtgggaaactggagtgcctggagaagacccacgaggacatgaggaaaacttgcaaactccacacacacagtggtcccggccgggaatccgtattcttctcatcaatgttataatgaaatgctgttgaatgaaacagcattattggaagacctgcggcataggattttatacattaaactgacatttatgcaatgtcagaaatccaaacaaggagaaaaaaatatactggctgtggagacagttttgaatatcagaatacttctgcattgtcaggaacctgccccggatggagtaaaggaggttttctctttttctctgagccatggtgtcataaactttagtcaccattacttgcgggaggacgggggcatggtatgttggttgaataattagttacagaggttgcacacttaaatagtgtcaaagaattataaaatcttagcatttgcaaagagcctttgcagtaaccttgttcaaccttcttctatctactgagtctttcattgattccttgatttactcataaaagtattagctctgccactgcctaactgcgtgtccttcagcaagttgctgaacctctctgtacttccctttcctcatccataaaatctggataacaatggtacctacctcccaggaggtaataaataagcattcaatgagttaacacttggaccgtgctcagaagagtccttgttaaagatatgctgtggcaacacatcatcatcaattacattcttgttccgcctccttgagctgcatttttcactacctgtggtagggagctctgtgccccacacagtggtgttttgacctctgggcagctttgcggtttagaaggctctttctcattcaaagcttccaaccagagagcgcttcctggagcagatggcagaatggtgctcttaggagctatctgaatttaaggatgggaaagttgtctgggctgtgaagctagggtatcatcactggacatcagaggcacaagagacatacctaagattttagccatgagggggacctcaagacactggcctcttttttttttttttttttttgagacggagtctcactctgttgcccaggctggagtgcagtggcatgatctcagctcactgcaacctccgcctcccagattcaagcaattctcctgcctcagcctcctgagctcactgcaacctccaccttctggattcaagcaattcttccgcctcagcctcctaagtagctgggattacaggcacgcgccaccacgcctggctaatttttgtatttttagtagagacagggtttcaccatgttggtcaggctagtctcaaactcttgacctcatgatctgcctgccttggcctcccaaagtgctgggattacaggtgtgagtcagaccacggcctctttattttacagccgagaggacagcacagacagggcctggctggtgcgacagctcaacccatcatcaggcagaacctggataggaggccagcccgtggggtgatactgccaaggcctgcattaccactcagttatcctctcatcttgggctgctcagggtgccctagagaacatgccttctgtgccctcctgcactagagcaggcaggaagagcagcctggaccatgggtaccacatatcctatgaggaccccattgtgccacgcgttggttgactggatgacttccactgtgtttacactgcacagtctcctcacttcctttagacctcccggtgagcaagcttgtattgtcttttgtgaattctggcatctgcctcccctctttttcttcctgaggttctgcccaggaaataccacatactggtcattctaggcccattcactgtctaatcaggctttgagcttgctagtgctatcagtgttttacagctgagaaggctggctcgctgaggttggccattgcctgaaggtctcccaggttgggagggtcaggttggggggttgtcacatacccctttccaccatgtcacaatgtttccttctaacacatgcatgcacatcataaaaggctcgagacccagtatatctggtctccctgcctgcattaatagcaccgctgccaacctccctcccacttccctccacttagttttatcatctaagaggccaaaagaacaaaatgtcccccctccaccacaccatatttcaaagggctataaataggactgttagtggtggcattctgggtcacatttgccagggacagactttatatgatgtcagccgtgtccttgggtgcaaggtttccatggctaatagttttctttctcccttctcttccttcccattttcgttccttctttttctccctccctttcttctttcgtttcttcatcctaaaaatcttgttcgaaagtacatagttatgcagccttcattagctgaggttgcttagaagacaaacaggtccatgtttcacaattcctcccagatctgagaaaggaacgtgactctgagcggacagaacaatatatgctgggcccagaggacagctgtacagcctgccagcatctcactcctctgaaagcaaattcagtccatccaagagcaaggccaaggggttgtctcctgtccaggaggccaaggccagggggagaagacaggctctggagtcaccaggcctgctgttgatcagtggtgagatctggggcaagtgacttccacgtccgagcttagtgttaccccttgtgctctgggggtgacaccaactcatcttcctgggtgagagtggagattcaaaaagaaaaaacaagctgggcatggtggctcatgcctgcaatcctagcactttgggaggccgagatgggtggattgcctgagctcaggagttcgagatcagcctgggcaacatgatgaaaccccgtctctactaaaatacaaaaaaaatcagccaggcgtggtggcaggtgcctgtaatcccagctacgcgggaggctgaggcacgaggattgcttgaacttgggaggcggaggttgcagtgagccgagaccgtgccactccactccagcctgggcaccaaagtgaaattctgtctcaaaacaaaacaaagcaaaacaaaacaaacaaacaacaacaacaaaaaaaaaaatgggtaggttgggaacagccccagagaagagatggccttcaagctgggactggaaagatggtgagccgttccaacagcagcagtgaggggtggagagggcaccccatggaggaatccactgcccaagccaggcacccgccgactcctgtgattggagggaagaggtggaaaaaaaggaaacagggaggtcccaatcaggtgggtcctaaatggcttgatcctttcggtaatgaggtgcaagcaaggtttcttttccttcctgcagaatgggatttcatcagactccccctcctttctttttttttaggaaaaccatgtggcccaggttcacagtggatgggagggcaggacgaatgtcccatcaatggtgcgggtgggagtcactgtgagccacatttggagtgtttgctccaatgtgagaattggtgactttatctctggggtttgagaacagattgcactacggtgctgagaaacgacacatggaaagtgacttggagattacgagcctggtggctgagaggactggggagccagggatgacaacggcggggggagcaacagaaatccacaccagggaagcgtgctgttcctcccattacagacccattggatctgagatgaggaagatgaactaaagcccggccaggctgagacgggtgaagaaaaagcaaaggcagaggagtgaagctcagttcaattctggaaaggctgagcagtcccccgcgggggtggcctgcttcctccccaggccgcacagacaccagccgggaaatcccttcccattcccttgtctccccagccctcagagtgaagtagaaaaacccaagtaggctgggcgcggtggctcacacctgtaattccagcactttgggaggccgtggctggcagatcacgaggtcaggagctcgagaccatcctggccaacatggtgaaaccccacctctactaaaaatacaaaaatattagctgagtgtggtgatgtgtgcctgtaattccaggtgctcaggaggctgaggcacgagaatcgcttgaatccaggaggcggaggttgcagtgagccgagatcgcgccactgcactccaccctggcgacagagcaagactccgactcaaaaaaaaaaaaaaagaaaagaaataaagaaataaaaaaaccccaagtagatggctggaccagcacttaggaggaaagcaggtgttcagttaaagtttctccaatctgaatcagacaggcagtagcagatgtgaagaggaggaggtggtggcccaggagaaggtaccctctctcactcatgctgacctggtcatgggcagtcagcgcaatcctagccttcttgacatccttagtcctttcagaaagggcccatctcctttgattcatagttctcactctccagccttcagcccttcatctgcctacacccctacatcccactgtcgagtgtaggattttggaacaccattgtcagagggtcagtggaatggatccacccccaccgctgcagtgtaaacgtggctcattcatgtcattcgctgcaagggagcatagggttggggcagccggagagcagcagatggtcatgtgcattcaggtgtcttccagagtagcctggtgactttgggcaggtgattgcagactctgaaaaatgggtctagaatttgactcatgctcatggttgtgaaattaacttttggaaaagtgcctggtacctagtaggagctcaacaatgaggagcggtcctattccctaaagacagaaatcctccacctttgatgagaatcagaaaccgctatacagccctgattgggtggatcttgtcgaagggtcccagttccaggggctcagtgcatggagtctgcagaagcaataaggccccggacacctccctgtactcttctcccttgtgtctcttcctcctggcccccttagcaccctgctcactggatccttctggaccctcactgtgaggcctcttagattgccgcaacctatgttgcaaactttgttctaggaacctggtatccaggctgttggccatctctaatttagtcctaagatagattcccaaaggtggcacaggttgcctgtggaccttttcactgcatgatcctaatcacagctgatgttttctggtgctctatgctttactaagtgccctcaaatgatgataacagaaagatactcgctaccacttctcaacaagcataccaggcagtgttctgagctcctgtgtacattttctaattcattctcataaccctataaggtcagggacttttattatccccatcaccaaaagaggagacacaggtactgagtgatgagataacttgtccaagaccctggtcagttgatggcatagccattggccaagtcattattgtgtttgtcccttttgaacagcaggtaaagtgaggcttttcctcatctgtcttcttcatgaccatcatcatcagcatttccacattacagatgaggaaactgaggcttccagaggcacacgggcaaggctggtgaaacaggagctgggatctaggggtttggatgctggggtacaggaactcatcctggggttgaaggtggagagagctggaagttgattgtctcagttctgcttacgttctggccacaatgaatctgctcatggcccatgtggtactaagagctgttaacagcaaagcagagtggagcagggagggctttttatgcaaacagtggggtgcacagggggttggatagtgtgtgcctcaaggtcatgtcagccctggcgccgtctctacatttgaactcagtatccctttgagcacaaagggatattgtgttgaagacagacctgactttgagtctcatctctgccaatttctagctgtgtggccctgggcaaattatactctttcagaatcttaatttccacatctgtgaaatgggagtaaaactaccagccccagaggactgctgtgaagctggaatgaaatcatgcacatgagatgctttgcgtgctgttggcctcattgtctgtacttaacctatggttgctattgttgatgataatagctcttccagcgaagcagccagacctcagtggttagccttcaaattcagaaaggcacttcattatgagagatcccatgtgttgagcccatttcagagagagaggttataagtgagaacagctttcctagtctaacaggtgcatgtgcttcctgcccaaagttcttctcacttttactttcagatcagccaagttggcctctggagtccctgggtctccacagagggagatgccaccgcacccaaaggggacccactctctgagcttccctgctcagtttgctcaaacgctggcatgaaccatgtcattcctggttcacacacccagaatttctgcccataaacctggttctcgacatgcagcccagccaacggctctgctgagggccttccagcactcacaccagatgtttctaggtcctctcaccattcctcactcagcttctgtgtctgctcttgcactttcctacttccggggcaacttgtcccatttgcgaactgatctggctagactgtctcagtcttgatctccttctccgtcagtgtcatgtcccggatgggaatctagattaagaaaccacctacttgcacattcatgagcctgccctggacacagagtggtgtggttccttgctgatggacctgtgttctctctccccctgcagtgggcttttctagggcagagctcaaaagtgtactgttgtccccagcagggcagaacacagtgcttggcccagcccagtgcaaggctcagtaaatactgatggcaagtaaactgtgttagtcccagactttacaatagagtagagttaggaattagttaatcattcaggctccagcctttatcagtcatatgaccttgagcaaattacttaatctcctcaagcctccatttactcaccttcaaaatgatgaaaatcatagtatacacatccaaggaccattgtgaagattaactgagcttttgagtataaagggcttagtttagcaagtacctgtaagtacttaaaaaatgttatctgttatgctagtttaagtgttatctgttattgctactaccagtatcaaagtgatttcatgttgttttgtattcacttacttcttatcagagccctgcaaagtagttgaagcagagacagttccattttaccaatgagtaaagtaaaactcagagaaaggcttgctcgctctttctttctttctttctttctttctttctttctttctttctttctttctttctttctttctttctttccttctctttctttctctttctttctttctgtctttctgtctctttctttctctttctttctttctctctctctctctttcttttcctcactctgttgccaggctggagtgcagtggtgtgatctcagctcactgcaacctctgcctcctgggttcaagtgattctcctgcctcagcctcctcagtagctgggactacaggtgcacaccatcacacctagctaatttttgtatttttagtagagacggggcttcaccatgttggccaggataatcttgatctcttgacctcgtgatccacctgcctcggtctcccaaagtgttgggattacagatgtgagtcaccaaaaggctgtttttctaatatcacacagcttgacttgaccagtgtcccctaggggcacacctagaagcaggccacactttttggatggaacatgtcatgcccacaggcctcagaaaagatccctataatttaaaaatgcagcaatagtattcagccagacccagtggtaacagttatccagatgattgtttgcatggagaggaaaagctatgatttattaagcaaacttgccctgctcctccaggagtggtatccagctttacttctagtttgctgctatacttcaagaagacacaaaattggagaatacactctcttatgagagttattgtattatattgtacagtagaaaggagcctcaggtggcatgagggggctgtggatggtggaagcgtgaatatgggccaagaaataatgatttatgggttcagaacaggaggaatgagaacataaccatgatttgtttgagtggaatttgtcctaatctgtgctctagctggagaaggtagacatttttcttgcttccgagtctcttggtttaagcccagcagttccctgcttggctcctagattggtgctagtggctaccagttggatggatggaaatgaaagggatgaatgggctggaacaggatgatagtaattcgcctggtattaggaagaacactgaaccccgggtctaaggccctctgcccactgtccagctgcacagctctccagctgtgtcatggaggagccacttctctgggccttggtttcctcatttgtggtcttggagagtcacatgagcttttctgaacctctccaaaaatggggacactttctgatttgtctttcttgtatggctcgtgtgtatgaacatgcttcacagatgtttcagcggtaagagtttagttgttgctcttaattggaagcaatcttggaagggtggggaaatagggactcaatatagaaagaggcatgacagcagagcacgagtgagaagagaactgggacatggcttttagaaaagatttccagggctcctgttaaaaccaaaaggcaaggaaagtctaaggagctcatcaggctgttcctgggatctggggcagaaagacagtggaataattgccttttctctgcatttaacaccccagtgctgtattagagaagctgagaaactgaggctgcaaaaggtgagccccacatggggtgcagttctagttttgtttgtttgtttgtttgttttgttttttgagacagagtttcactcttgttccccaagctggagcgcaatggtacgatcttggctcaccacaacctctgcctcccaggttcaagcgattctcctgcctcagcctcctgagtagctgggattacaggcatgcaccaccatgcctggctaattttgtatttttagtagagacagggtttctccacgttggtcaggttggtctcgaacctccgacctcaggtgatttgcccacctcggcctcccaaagtgttaggattacaggcgtgagccaccacgcctggcgagttctagtttttaagataagcctccaggttgcaaacttgtcagttggaatttggaatccaatgccattgccaacttatttttttcaaagccaacttaagaccaatgaaagaattggttcaagatgttatgcgttgcttcatgaagagtcttaggctttaattgaagatcacagtcggccacaggtgccaggctgtggagtcagaggcttcattcagagcagggctccatgtttaatctgattcatagattaccgccttatatctttttttttttttggagacagagtttcactcttattgcccaggctggagtgcaatggtgcaatcctggctcaccacaacctccacctcctgggttctagtgattctcctgcctcagcctcccgagtagctgggattacaggcgtgtgccaccacgcctggctaattttttgcatttttagtagagacagggtttctccatgttggtcaggctggtctcaatctcccaacctcaggtgatccacccacctcggcctcccaaagtgctgggattacaggcgtgagccaccacgccccgctactgccttatatcttatggcatagaacagttgcagtatatatcctgatataggcatatatacatgcaggtttttatattacaaggattctcaactatttagtaagatgtaacatacataaggcccaaactcagtaatgagcttctgcggagttataaatcagccacatcctgatggattctctgagattgatctggctgttcacccatttattcatggattcactggtcattatttagtgcctcctacacccatatgatagccagtggggtaagagtggggaaatctagtgacaagtaaaatatagctcccttcctcacctctgaagtctcagtctagtgagagcaaccaacagtgggattgaggtgatgcccggtgcttagtaaattcttgctaaatgagagaatgaatgaagaaacacatgaatgtgtgctcccagggtgctcccaggtaaggccctaatccagcttcgagtttggaaggtggtgtgtccaagaaaacatcttagaagtgtggtacctgtattgttttggtcaccctctcattcaagaaataggaataggccttctcccacatgccaagtggtgtgctgggtggtgagggcacagtggtatgtagggcagacatgcccttgcccttatggagttaacgtgttggcggtaatgctttgtaggaatgcagggaacactgaaaatatcgaggggcagtgcccagccttgtccccagagtcagcgaagatgtctctgtgaagtggtgtttacactgaaatgtgaagggtgagtagaaagtacagagggaatggggaaggtgtgagccagtgatgcaagggagggaggcctgagttacaatttacaaggatccccctggctgctgccaagagagggagttggcattagaggcgatggctattttaagactggctaggaggctgtggcagtgagcatcgtgccttaattctcatttctgaaaagaaagagtttcgttcctatagctttcctggaccctgactcctaactgtgctgactctggtcatgttcatgtatcttctaagtaaacatcctgcccccatcagcaggtgccaaatagaatctgtttatagtcaacaccacacatggtttccagaaccaggcaaatgcctttagacaactctgggcttagacagtcactaaatgctgttgtctctccctctaaaagagctcttgaatctcccactcctgcttttgcccagggccctgccttctggccctcattatctcttcataatcaccaactcaacaggggctgaactttcttcctaacacacaagtttatcctcatgtatcaccattgccagcggtataaagaaacctcagtggttgtatcagtcagctttctctgtataacaaacagccccaaaccccagtgcctacaaacagacatttatgatttctgtgggttgatgatctggtctgcacagtttgtgttaggctgattgcctgtgctggcccatccacacatctgggggctgagctggggtgcctcagcctctctccacacattgtctattatcctccagggggctacctcaggcttgctaatgtggcagcagaatgatttccagcagcagctgggcatggtggctcatgcccaggagctcaagaccagccatggcaacatagcaagaccctacaaaaaataaaaataattagcctggtgtgatagcacgaacctgtagttccagctactcaggaggcttagagggaggatcgcttgaccctggaggtcaaggctgcagtgagtggtagtcatgccacggcccctccagcctggaaaactgagtgagacccatctcaaaaaaaaaaagaatgattctcagcagcaagagagaggaacttttaggtataagcacttttaaagcctttatttatgtcacctttgctatggtgccattggctaaagcaagtctcgtggccaaacttcgattctccctcatgctgggaggggaggcaaagccacactgcagagtgtgcgtgcaggtggcctgaacaaattggggccatttcgacagcagtggttaagagttgagggtttctgtgctattcttcctgtcagatgaagtctttttttttttttttcctgagatggagtctcgctgtcgcccaggctggagggcagtggtgtgatctcagctcactgcaacctcgtctctcaggttcaagcaattctcctgcctcagactcctgagtctctgggactataggcatgcgccatgtgccaccacacctggctaacttttgtgtttttagtagagatgagatttcaccatgttggccaggctggttttgaactcctgacctcaagtgatccgcccaccttggcctcccaaagtgctgggattacaggcatgagccaccgcaccctgccagatgaagtcttcagaaaccctttcctatctggcctcagcctgatttatcctaaccccgatgtcacactttcacattcatatcttacatatttatttttcctttccccatgttttgtgtttttactaaacagcacctcattagtgctttgtttagggagcagctaaaaatatcatctcctgttcaaattcttcttctagatggagttggtcatttgtcctttttttttttttttttttgacggagtctctctctgtccctggctggagtgcagtggcacgatctgggctcactgtaaccttcacctcccaggttcaagcaattctcctgcctcagcctcccaagtagctgagactacaggtgtgcgccaccatgcccagctaatttctgtatttttagtacagatggggtttcaccacgttggtcaggctggtgatgaactcctgacctcaagcgatctgcctgccttggtctcccaaagtgctgggattacaggcgcccaagccgcctgtattacattgtcctgaattgtttgtgtatttttctgttttctcccagtctgaactccctgcggagaggagttgtgagttactcaccttcctgttctggtgtgtggctctgtgccgggaacagaataggtgtttgtttaacagatagtgctgtataaataattgggtgagtgagtggaataagtgggtgaatatcttttcattatcttgagtcatcctaaaaaggcagaggatggactaattgtcaaaactgacttaaacttttctcctcttctctttcagttggtaccattttcagatttcatcttcctaaactggaaatgtcaatgagaggaaattaacacccccaagagctgcagtgagcaaatgcattgagcttgggtcaggacaattccatttggggaccagagatggacggtcactcagcctatggaggtaaagtgactaatctgtccgcagcacaagtgagatgtgctgtcttttctgttttgttttgttttccattgattatgttccatggaggatgtggaagatattctcctatttcttggtctctgaaacatgtcctgcttgcccagaaacgtgccattaagaggagttcccatggaaggggaatacagtgtccctcaggagaaatatgcagactgttagtgtctagcagcttttctttttcttaaatggagagctttctgagctctcatgaacactggtaagtaaaaacctggattcagaacatcttttgatgacaagggcctgtcatcctgacgaaggcctggcatgacactctggtgtgtcctagagcaagcatcagcaaactgtggcctacaggacaagcctggcccagtctgcctttgtaaataaagctttgctggcgccccaccatgctcatttgttcaggtgtcatgtatggctgttttcacactgcagcagcccagttgagtcattaccatagagaccgtgtggctgcaaagcctgacatatttgttccctggtccttaacagaaaaggtgttgcaacctctggtctacagctgagctgtccacacagaaccacttcttatggggataatgaaattttaattaaaatgaaataatacgaaaaattcaggcctcagtcacatcacagttcatgtgcttagtagccacatgttgcttatgggtacccatggatagtgcagagagaggacatttttatcagcgcagagttagcttgggaaaaattgagatcaccctggatatgtcacttcactctgctggtctctaacccagcttgggcatgattgccatcactgcagaagaagaaggaaggctgatgtctgtgagtgtgtatagctgttttttatatgattattggcaaggactctctctctgtcgtgcacactgtctcactctctccctctagtataagaatggagtaacttttaaaatttctttgggagccatcttgtggtctctgtatgtgactccatgtaaaacaaatccacttgggccatggggtttattagttttatttatgcaagtagatatggatgtgagcttgagcccttctggtgtcacaggtaggtcaggggccgtgtgaggcctcctctaaaggggaagaagcaatcgcttctgtgttcccaaggggtagatatatgggcaagagcgataagaaacaaggagaggaagaaaatgagctgaagatgtggcatgtgtgagtcttagaagaatgaggaagaatggagacaaaagaccatgtgattcctggttatggtcataggtttactttgaaagaacatgttgaacaaagtaatgatgcttgggaacataccacatctcagaattgtgctgaacacagccagttctatacgatagacaggttgggaagagccttggacctggagctagctcaccatcttatgggacaagactgggggcatggcaggaggttctgcttggtgcataagccagtgcaagtgggaataacaagggctgatcattgagatgcacagtttgtatggaagggacccaagaaggaacagagaagagactctagatggcctacaggtctgggcaaaggccccaggtttggcatttagaagttgggctttcttatcgttgggttacccaagcacaagcaagaacaaagcagagactccactgatgagaaaagatccaattgatatgtattctgcacatctagatttgaaaatggcctcctgcctctttcttttggttggtcttcaagcacctcaccattacagaggagtgctgtatgcattttaagcaggcatttctataacaaaccttcaaacaatggagtttaacgcagatatgaagtaattataagtaacacaaatagtagtattaaatttttagttctttcttacaatcaagcatatccagaatgatgatgatgatgatgatgatgatgatgttaacagtgataatattttttgtccattcccagcttattatgtgccaggtgcatgttctactgataattattattactactaataattattatagctttaaattattggcacatacaatgcactaagtaatatattgatttttttctcaatctcatgaaaccagagcattcgtttccatttttaatttttttcaattattttatttttatataaatgcaaatttatagaaaagttataagaacagccaacaaattcctggacctccttcgtccaggttttcaaatgttcgcattttattatgttcattttttcttttttctctatattttttcctgaaatcagaaacttgcatcttagaacacaactttctaagtcagaaacttaacattaatttgactattatctaaccttctgatttctcattcagatttcatcacttgcccctgctaaattccttcaaggcaaaagaaaagccagttggcatgtgtctttcttggaaaactttcttaatcttgtatttcagcacgttaacctttttgacaagttcaggccagttatttgatagaatgcactcaattttggcttttctgatgtttcctcctgattaggttggcaggactagcccagagctgatgtgtccttttcagtgcattgtatcaagaggcactggtgtggctgtctcccattactggtgatgttagcttggagctctcagttaaggtggtgtcttccaggtgtctccactgcaaagttattgtttcacctttgcaattaataagcatctcatggggagaacttccgggattgtgtagatttctgattagtcctcagtctatcagtcattagttttagcatcttttgatgattcttgcctgaatagatttattattatcatagttgccaaatggtgattttttaaattttgctggttctttttcatttattagttggtttcctactataaagaagaaattttcttcctctgttcatcttttttttttttttttttttttgagatggaggagttactttcacccaggctggaatgcagtggtgcaatcttgatctttgcccactgcaacctctgtctcccaggttcaagcagttttcctgcctcagcctcctgagtatctgggattatgggcatgtacgaccatgcccagctaatttttgtacttttagtagagatggggtttcatcatgttggccaggctggtctccagctcttgacctcaagtgatctgcctgccttggcctcccaaagttctgggaatacaggcgtaagccaccatgcccagcccttcctttctttatatcagtgtggactcacagattttaactttattcaataggttgcagtcttttgtgatcattagttattttgacatttacgttgccccaaatctgtccactagggcctggctcctgtgtctctaacatttctccatcgtcatttgagcacttgctgccttgttgtcatagcaaggtattctagcctcatcttctactctcctcacctcagtggtggaatcaacataggagccctggttcctttccatggaaaatggtgtttagaaaccaagatctggccactaggtgtgctcactgtttctggggtagcattgcctctaggccctctgagcagacataactgggatgtgtgtgtctgtgtgtgcgtgggtgtgtgtgtgtgtgtgtggtgtatcacacagatacccacatttatatacatacataatcacatccacatgtatatccacacatcattcagatcattttcaaattgacctatctatctattaaaatcaccataggttcatactaattatgctaggacattctggaaattcatgtctatctgaatgatgctgaacagtcattctactctcactatcaacgccgccaccaactgcatttattaaaccgtgttcaggcccagtttcagaccctttcccttgctgttacttctgacatcaactcggtggcccaagtacagatgagcaaaccaagactctgaaaagctaattaacttgtgcagattatacagctggtaaagcagcaagcttatagcaagcacctgtttgtccctcggcttttgatcaaaaggcctagggagaaacctctctcaggacagaaactagagcagaagactggggaagcatttgtccctgctgacagcagtgtctggccgtcacagtgtaggccagccaaaacatgtggaccgtgtatatggtctgcatctctcagatggagtcctgttaggaggtgtgtgtagacgcacgtggtggtgtatgagttgcatgtgggagtgagagtttctgtgggggatgcaggactgctgtcctgtccttgtgaagaccttgatcaggttgagggtgtgattacagaaccaggcgtctctgcagagggagcatttgttctcttgcagagtgctttcctgggagagctgcttcagtgtggaggccttaacttaaacacatttgtgtctccagctcccagcaaacatgcagaatgtgcaccagataaatgttggtttcaggcaggcattgacaaacatttctgagcttcttctgtgccaggcactgctctaatcagacaaagatcctagctaggggtgagaaagagggagagacacacagtctctctctctctctctctctctctctctctctatatatatatatatatatatatatgtttatatatatatgtctatatatatgtctatatatatatgtctatatatatgtctatatatgtctatatatatgtctgcatatatatgtctatatatatatgtctatatatatgtctgcatatatatgtctatatatatgtctatatatatgtctatatatgtctatatatatatgtctatatatatgtctatatatatgtctatatatatgtctctatatatatgtctctatatatatgtctctatatatatgtctctctatatatatgtctatatatatatgtctctctatatatatgtctatatatatatatgtctctatatatatatgtctatatatatatatgtctatatatatatatatgtctatatatatatatgtctgtatatatatatatggtgtgggcaggggcagggggtcccagggcagggcatagcatgggtgtggtggtcaaggagtgtctcttccaggaaatgtttctagaacaaagtcacatgacggacaggaaagagcaaatagggaggtgagaaggagagcaggggctgttgatcaaaggatacacagggactgattcagtcttcttcagggggctgtggctgctgtcatttcccctcagagaaccaggcctgttttccttctgggcagtgtcacatgggtggacactccccgttggagctaaagcatttcctccaacaacaaaaatgtgttatcagctggcccagagaccgaatgcaggccagggcactctgactagataagaggacaacctggcagtcgttcaatattccgatgggcagcagcgaggagctgttggaatttccgttgctgataacctttaagagcagcagtggcagaaacaggggttgtttggggtgggaggggagaggagacttgggagcactctggagtatctgaaaggctgatggggagagaaggattagcggattaatgtgtagagggtgattttgaggatggatccaagtggcgtgagtgaaatgaagagcgggggagcttctcattcaggctgtttttcctttcttcttgttcattcagtcatttagtaaatacttactgagtgccttccagctcactggcacttggctgagcactggaggtaaaacagaataagatgagagctatgtcctcaagatgttaataacttatttgtttccttgttttatttacttatttattttgagacagagtctcactctggtgcccaggctggagtgcagttgtgccatcacaactcactgcagccttgaccttccaggctcaagcgatcctcctgcctcagcctcctgagttgctggaatacgagcgtgcgccaccatgcctggctaatttttatattttttatagagatggtgttttgctgtgccactcaggctggtctggaactactgggctcaagcaattccccagcctcagcctcctaaagcgttgggatttcaggtatgagccaccataactggccgatgataataatttaatgggagaaaaagatcaattaataaatcggtggtatgtttaggtgcagttctggttctttgggtcctgaagcttatacaatttgggagttttctttaaggaaaaataatgcaaagttatgactttgaaataaaatgcaagccctagataagtggggtgcagcccaggggctggagcgtcagcttcctggacgtgctctggttctttgcccgctttgtgagctgcagtgtcagcgagagtgccttctcttacctgctgcctgccgggtgagctggccacaaggggagttggcggtgggaatcctggtgctccatggtacagtgaatttacttgccttctggatcctctgagtccttgtgcttgggctcagggaacagggcgaaagaacttcgttcttcttggttctgctgggattttcgaaggcactttccttgaagttctgcgggctgacctgtgatcccacatcagggactgcattctcaggaatcagctgagctcaggagtcctggggctgggggagtgtttgtgagcactctcgcagggctggctgtggcccttacgcctttgtaacaaccccacacacatagatttcaccccacagcctccctggcagccagctgctgtcatttcccttttttacggatgatgaaacccaggcacagactggttaagtaacttaacagtcacacagctaataagttggggggctgcgctgtgaaggcttacagcgtctccagagcccagtccccttgctgcctccccatcatcctcactgcctactgcttttaagcaatatgctggaaatacctgcaatgtcaagattaggagatgagctacatccagtacagccgcagaatggaataatatgcatttgagccacacaaggagtttttaaccagcatggtggaatgctctaatttttggtgtgaaggtgggatgtctaattacatatgcacagagaaaggaatgccaagtgctaacagtgcttggattccctcagccttttgcatcctctcctgggcagctgtaacagactcactcacacatgcattcaataggttttatttatttatttatttattttttgagatggagtctcgctctgtcgcccaggctggagagcaatggtgcaatctcagctcactgcaacctccgccttctgggttcaagtgattctcctgcctcagcctcccaagtagttgggattacaggctcccaccaccacacctggctaatttttatatttgtagtagagatggggtttcgccatgttggccaggccgatctcgaactcctgacctcaggtgatccccccaccttggcctcccaaagtgatgggattacagacatgagccaccatgcccggccattcagtaggttttaattcaatgcctttgacatgctgggtacttcggatacagcagcaaaaaacaaaaacatggtttctgctgtcatggaacttagtctggcctgctgtttgctccttctgcctatactttcttcctccagctttcactagagagatctttcggaagccctccatggttccgcagtgccctcaaatgcagcccctccctgcccctattgtctcatgtgtaaaatggagcagaagacgcacagaccttccagacctcagagtgtagctcttctcagttgttggctagaggctttgcagtcacaactctcatcattaccatcttctagaaaggtcaggcaccggacagctgaaaccatggcagccggcaacaggaagtgccctccctgggtgctcaaagatccaagacagccgggccctgtgtttgtaggaacaagattccagatgcctctgctgcttgccagcctcgtgaccttcattcatgcagggccttgttttcttgattcagtggggccaatcccggcccccaggggagatggatgctgcagggatgtgcaagctgtagagggttccagagaatgggcctggcgttctgcaagcctggcacccctcctggatgcttttctccagcccttggagcttaggcagtgtagtgttaggatgattattggatttcctccacagttcctggctcattcttttgtagcccttgttacagccttttgtgataatattgggtgtggcaggcctcaggacacaggatctctccaactttctcctgccttccttcccctgccctaacacaggactctaatctttccctgactttctgactgtgggtcttgagatcctccccagagagggtcctaccctgtaccctgggagaaggaatgctgatgtcaggaagcttccataagactgggttggaagagcttccagatagctgagcactggaggttcctggagggtagcatgccccttcccccatacctcccccgacgcatctctctatctgtatcctttgcaccagtaaatatgttttcctgagttctgtgagcccttccagcaaattaattgagcccagaaagggggtcatgggaacccaatttgaagccagttggtcagaagttgcagagacccggacttgaggcttgtgtttggggtaggagttgggggcagtctggggcactgatctctcaacctgtgggaactgaccctgtctccaggtagatggtgtcagaattaaattggaggacacccagctggtgcatggtgtgtgggcacagaagtcttctgtgttgaccgttcgggtgtgagagcagaggataggcagggtttcagagattttatgaaataggtgggaataacactttctgagacttggtttccccatctgtaaaaaaggaagtagtaatagtacccacttgggagagttctgtgaggactcaaatgacacgaggactcaaaaagctgggtacggtgtctggcccatcgtaaaggctgagtaattgacaggtgcatttatccctgtggttcctcactgagcccgtgataaatgggcctgtggcaggacatgagtgagctgcaggaacaggagccaggcctcccaccttgccggcttggaagaccgtctggctgcagcagagacattcttcccagaaagaaggggctttccatggtgaaccactgtggccaggcccagaggcctttacaatgccaatgtcccaagaagagaggggccatcagaaggatggaaattttctatgtgcttccagaaatcaacctacagattgatcccttctcaaaagactaatttttattctagtcatgcccagctataagcatttgggcatttacagataatctttgttcctgaagggcatccgagtatgtccttcctccttttaatgcccatgacccttactatcctggaacagagtccacattgcagaaaggacaaggctcaccacgttcagggccccatcaagacccccagcctcatgtgtgctctccctgtcccaccccaccccaccttctgctaatcacagagtcatcttcacagtgtgaaccctgaatacagatgacccgggttcaaatcacacttctgcttcttttgccaccttggatacagtatcttctcttgatctcagtttcctcatctgcaaaatggacataacggataacaacagcaccaaactccaggattgaatgagttaatacagatgtggagatatttcaggcttggttccaggccactgcaataaagtgaggattgcagtagagcaagtcatacagattattttggtttcccagtgcacacaaaagttgtatttatactatactgtactgtagtctatgaagtgtgcagtagcattatgtctaaaacaacaatgtacatatcttaattaaaaaatacttttttgtattttttaattaaagccatgctggcttatgctcctagcactttgggaggctggggcgggcagattgcttgaggccaggagttccaaaccagcttgggcaacatagcgagattcaccccctaccaaaaaaagtgaaaacattagccgggaatggtgcatgtgcatctatagtcctagtcacttgggaaactgaggccagaagttcaaggctgcagggagctatgaacagaacttgacagagcgagaccttgtttctaaaaaaaaaaattaaaaaatactttcttgctaaaaaatgccaatggaatgagcacatactgttggaaaaatggcaccaatagacttgcccaacacaaggttgccacgattagtaaagacaataacaacaaaaaaataatgcagcacctgtgaagtctgattaagtgaatatgcctatgtatgtgaaagtgcttagaaccctgctagacacagcagtctctaacagccagtattctatagatctatagagaatatgaagctaaagatgtggctatggatatagatatagatataatgtagctctagcctgggctcatcaccccaaatgtagtacctgccatgtctgcaggacttggtctgtgaggtttgcatgtgctcttctctacctggaatgcccttctcttgctttcctggggagccctcagctttagcgttgtctcttccgggactcctcctcccgctttccactccatcctcagctgcagggcttctccctcgtcagccctcaaacccctgcctgtgtctgccttcctttcactgaccacactgtcttgtgaggaagggctcatgtacctttccttttcccctgctgcactgggagccccttgagcggtggtagcctatgctttattcttcattggactcacagagcaccctgtgggccaggcatgcctttccctcaccagcaccgagactggtgctctgaaggctggtgcagtgtgtccatttgtgtcagccgcacagagccagcccagctgctggtttgatagacatgatatctggctagctggccttgctactggcctggacacatgcctgggcccccttggggattaattctctcttctttagctcctccgacttgcctccagcctttggagaactggaaatgggcggaccccatgtctgtgggctcctggtcctttcactttgctatccacgccttatctgcgttccatgcaggccagaatacagaatacctgctgtttgcagccctgtctgcctccaattaacttaggcaaacacaccctgccaaaatatcccacggccctttctgatacggatggcatggggtgaaggaggaaggagacacgagtgaacccaaagccagtgtgtctgaaatccatttggcaagcatttgtgccatgtcctataatatatatatgtccatatatatattataacatataatattatataatatatgtccaatgcctgtgtggggaagtcacttcaccattttgctcaatggcaatgaagaaatggcattcatgtaaacactttctcagtctctaaaaatatcctttgtgctggaggattgggtgtcagaagaagaggacgaagggaaggcctttgggtctggggagatgatttgcttattctgttggttgaatagaatggaattggctttctgcactttgcaatctcgacagatggtcagtcatctaactggatcctccttgggggttgggcccgtttttttccccattgaatccccagtactttggtggaggagaggtcactcagggagtgttctggaattgccccaaacaattatgctatatggttgtattgtgttaatatttcatcaagaggaagtgccatacttaagtactcatctctccctgttgctgcttatttgcatattagcgtatgtcatcatcatcattatcacaaacaccaccgtgttgcctttagcattttctgtcatttgaactatgtcctttcgataagttcccaggagagagatactgaaaacgctttgaaggttcttgccacctgttacccattgtgactttgctgtgaaattaggagtggaagggagatggagatgggggaacaagagctggaaggggatccctattgaggctgggacagggagcagtacaaaggtcaggatacagccacagtgggattgtttgacgggcaagtggatctgcctccaatggggcacagagtgcaagtcagggaggaatggggagctgggagggatggacacacggatgaaaagacaggaagttcagacagaggaactcgctcctgataggagagaaagcccattctcatggctctcatttcttggggactaatgtgcggtgagttggtggggagcggggtgagctctcacacctgtgtgtaggctgctcgagagcccatgcctgcactagagcccatgactcacctcaagtccatttgaaaaattagggtgttggtaattcacggggaaaaatagcacagacaaggatcatgagatcctgggtgtctgcaacacctgcacgtcattctctctggtccccagggtaccacagacttaaggaattttacacaactctgaggtttggaattctatgggtctccacggaattcagagtgccattggactgcgggggcgctgggggactagaaggcccacattccatggaaatccagggattccaggaattccagcatccagcggaaattcagagaaccatggcccctgagtaattcctctgaaggaaacgtagtcaagaaagactaattaatttatacctactccttcagctccagcccggcacttaattagtaccttagtggtttcaacgaatgaatatgggaaagagtgagagaaggagtgaagcagaagttagccctccaaagctatgcttctcgtccccaaactatcaccccctccacgctggggaggagcatgtggctgtcccagcacctgcggactcttctggcattttgtaggtgagggctaaggatgctatagatcctgcacaagggcaggaagaacagttctggcaaattgctaaacgtgtcctcctcagaacaccactggacattcggtactgaggaacagcagagtatggcatcacacgagccgccccaaagtttttgctctcgaggatgagcctttcactctattactattgattggtcccaagtagcttttgatgtcatggcttttatctgttaatatgtatcatattctatattaaaattgaggaattatttcaatatttatttagtacttcatttgaaaaatcacaataaagaatctatcatatggtaacataaatgacttttttttttgagacagagtctcgctctgttacccaggctggagtgcagtggtgcaatctcggctcactgcaacctccgcctcccagatacaagcgattctcctgccatagctgggattacaggtgcatgccactgcacccggctaatttttgtatttttagtagagatggggtttcaccatgttggccaggctggtctcgaactcctgacctcaggtgatccacccgccgcagcctcccagaattctgggattacaggtgtaagccactgtgcccatcccataaatgacattttcatgaaaaaataactacttacccaaacaaacaacaacaacaacaaaattagaagagtggtattattttacagatccctttactatctggcttaaaggaaaacagctgggttttcatctctgcctctgtattcagtctttcgtgaaatcagatgtcatttgtctctggggagctctactgtacatgcaggacagaatgagtgtgaaagagtaaatgaagccttcgtctcattatgaaaatggctttgatatcatggattccccagaagtatcttaatgactcagagatccctgaaacgtagttttacgaaccgcagtacagtggttaagaacatggcttttttttttttttttttttttttctgtttttaagtttcgggatacaagtgcagaacgtgtgggtgtgttccataggtatacatgtgccatggtggtttgctgcacctgtcaacccatcatctaggttttaagcaggcattagctatttgtcctaatgctctccctcccctcaccccctgactggccctggtgtgtgttgttcccctccctgtgtccatgtgttttcactggagaagaacatggctttttaagcaggctgcctggggtcagggaggtggcagggaggaactgcatcctggatccacttgcagcccactgggttaccatagacaagagatttcacttccctgcacctcacttcctctgtaaagtgggataatagtagctactcgtaggattattgtaagagttacattagttaatattttaaagctcttagaacagccaggtacatattaaacgctatacaggttatgtatctatagctacacacacatatcacatacatactatatacatacatgtgtttatatgtacacatacataatgtatatatactatatgtgtgagtatatatgtgtgtgtactatatagtcatgtatatttatgctatatatatattacatatactaaaaccaattgaaaaatcacaaatgttactatagcaaaagtcacccatttcacattatttctaaaaatatgaatgtgtaagagctatttcttaaggcagcttttctatcccctactaagagcgggggacagccactgctgtgtttggggtgctgcagagcataatcataaatgtgggagtccagatacaggtcagctgttagggctccaggagtctgcggacccctgccctcacctctttgtgtcaccggagctccggattaagggctttctgacaactcctgaccacactcctcatcttctttccctccctttgctgatgaagcaactgtcttcatttagctgcctgatggagaacatctgcctccaggcaccacagaaatcaaagaaggaacccacgatgctggccccaggaagtccccagaaaccccaggctgctcctcctgtcacacaggatgcttttcccgaaatgctttttgtctggaagctctccatatgagctttacaaaggcatgtgcattcccttagcctttgaaaactctcataggttcaagaacaacaacaacaaaagccttggtgtcagtgatctgagcacagcattggagtatgctaagaaggcatcagggactgggcacggtggcacatgtctgtaatcccagcactttgggaggccgaggcgagtggatcacctgaggtcaggagttcacaaccagcctgacaaacatggttaaaccccatctctactaaatacaaaaaatattaactcagcgtggtggcacatgcctttaatccaaactacttgggaggctgagacaggagaattgcttgtacttgggagacagaggttgcagtgagccgagatggtgtcattgcactttagcctgggccacaagagcaaaactctgtctcaaaaaaaaaaaaataaaaataaagaaaaaaaaaagaaggcctcaggacactggctccttgtcctctgagtgcctgctgtgcgtccaggtcctcagcgtgatgctcacctggaaggcattctgaataggacaagacccaccatgtcaccccccctgctctagtttattcattaattcaattatcaaatgtcagtggaatgccttcaagggcggggcagggttcagagccctggggacacttccataaactcacaagcaaacgttccttgcgaaacctacagttcagtcaaggagacttctaataaataacaaagttaacaaataagagatttcatgatgtgtaggagaacaggtgctagaaaggagcgggcggggggctggggagcgctggcagcagaggggcccggggtcagcaacactgagaagagaaagatgagcagagacttgaggaaggcaagaaccttgtccacgtgggtgtctgggggacagccctcaaatgggggttacaaagctatgcctggtgagtcagggaactgagagtctgggaacctgggcagtgcatgaggggctagtgggcaaatgagatgagaagggggtggccagaccagaggggttcttgttgacctttggtgacatgacatgcctccaaggtaaaactgccccttgctggactgcagtgacttcctgttgctgacttcctaggcttctctggccatctaccctagagcccaccatggggcccggagcccctcctctgggtcccctgatattccatgttagctctcgcctggcgtcctcaccttcaggtgggagttcatctgtctgcctgtctgcctcccctgttagctgggcctctcaattttccatcccaccataagggacagccagcaggtcctgagttttacgaccttgtacatttgctcggtagcagcaccttcgacctataagctcccaaggcccatctctcttcttcatcagaactgccgcatcctctctggcccactttctgtctggcatttgcctgacatattcctccagtagatgccaaattccacagggcgaggacctagtcgttctccatctgcgtcaccttaagcactgtggcaagagggctagaaagccggtcccattggtgggaggacccatcaccacaggggttggcccgcgagccccgtatgcctggccctgcccagctgtctgcaaatctgtgtatgctctgctcggtcaccactggttcgctttgtcccacctgtgctgtgtttctctactagcttgttagttgcagagccccatgtgtcttagcacaggctgattcctctaccagaaatgccattttttctgtttattcatccagcaagtgtatttactgacccttgctaactcatgggaaggaccatctccattgggaagctgatgccccgtcttgtgacacgttttcatctggtcacattggactgcgaatgcaaagccctggggtggagaggggaaatgtggtcctacccttggagccctaataccctagctccaggggcagcaaatgttttctgtaaagggccaggcagtaactattttaggttttgtgggccaaatcatatctctcatgactattcacatttgctgttgtagcacaaagcagccatagacaaaacataaatgaatgaatgtatttgtgttccacaaaacttcatttacaaaaataggtgggaaggccaggtttggcccgtgggctgtcattcgatgacccctggtcttgactcagtgtaggctgtagagggaaacagcttgtatagctcaatgtacttgttaattgctaattactagtgttcccatcactggacagagactcttccagggcacagactgtcctgcagtcaggattgtgccctcaatgcctagcacagtgcctgacacaggacaggcatgcaggatatgtgaataaatcaatgagcaagtgaatggaaattctgtaggtactgagcttagcaatctaggctaggtcctgctccttccctgcaggcacaaaatgctggcaaggggcttggtgtggtctctgggggccctaggagtgaaactaaataggtttctccaagtgcgtcatttctgggtaattttttttttcttttatttgagacagagtctcgctctgtcaccaggctggagtgcagtggtgtgaccttggctcactgcaacctccgcctcccgggttcaagcaattcttctgcttcagcctcccaagtagctgctactacaggtgtgcgccaccacacccagctaattttttttttttttttcagtagagatgaggtttcaccatgttggccaggatactctcaatctcttgacttcgatctgcccactttggcctcccaaagtggtgggattataggcgtgagccaccacgcccagcccatttctgggtaattttaatgagctctcgatgggaatgggctcagtcccctggggtggccagagcccatctggattgacttcaaggagttatgatgcgagctggggtaggtggagaccttgcagtctgggaccgcccagcaagcaagctgtttttccttcccccagatcttctccagctctgcgtgagccatgggctgagtcctggcatatagttctcccgtgcctaggatgagccaaatgctattttggttgcacgcacatgatgtcatttaattgtcatgacaacctaggttgtgaatattatcattatcctcattttacacagggtaaactgagtcacagatctgtggcttgcctgacgtcacactgtagcttagggcaaagttgggatttgaacctggcaatctgattccaggctccttgctcataaccgtcattattctaagctgacatgcagtgtaaaggattcagacttgcagggaccaagagtggacacttttcaccccaccacctcaacccctttactcccgatgccgacactgttgcacagagaactaaagtaattggccccagaccacatggcattagtagaggcagaatttgaagctgggtgattcgatttccaactcaatgctttctccacaagctcaagcccctcttttggcttggcacctgtaggcaaacagaggcaagtctctcccctctttctctctgcctcccctcccctcagagtagaacaacctctcattttatcctttgttaaagagcagccccttcacaaagaagtgacagtacgaacttgcaccttagttagcatggatgggtgccctgggccttcaatcagtcaggtcagggatcaggtgagcttgggcaagtctcctcacctctctgaccctctgttttcttgtctagtgactaggggtacaaggcctgacttcactgagttgttctgagaactgagtgcagcgatatgtctcagtgtctgcctgtcacagcccttggccttcagcaaatgtggtttcctgtcctgcttcctcatctctccccacagctccctcgcccactctgccccaggaacaacagtgcaccccacccactgtactcagctggaaaactgcatccaatgacctctcttctaagcaaccactctgacgtcaccttgtgcaacattctaggtccatccaggaagcaacgtcaggctatttctaccccaggcactgtggcagctcacttttttcttcttgccctgtaattacagggttttgcagtggtttctctgttgcctaaaagtctcaaaattttctttgtttctccgtaacacataattgtatctcaggaacccacaagccattaggtccctgaccctcaatagatgtccttttctatggagacagacatctagatcaaaagaaagatgctggctggttggagcaaactatttgattagacaaaacccttcatgaggcctctacatggattttgtggccctgggtggttggagagacttaggagccttcatgaacttttctacttcccctgtttttgatgtagaattatctgcaggagcccaggtcccagactctggctggggaatgagtatggtagaataatagcagagggtgggggctctagtgtctaggagacacagggatgggtagagttgccatgtttgcaaaggtgggcatcctcagctcttgagcttgcctgaacgcaggctgcctggagcctgacccaactttcctaattcatggctacctttgtgagctgaaagaattgtcagtgatggcagcagtggcctatctggagcagctgctgtggggatgccagctgcagcaggggaggcatagctggggctgcatgctccacagagctggcagggaccaggaacaggtgggaaccctgccttctatcaagttggcagggcaggagccctgagctcccaggcacagctgcagctacctagccacagctctggacccaggcatccctctgctcttggggacccaggaagcccccctgtcatgcaggcttgtaattgcctgctcccgctccctggcatctcaccactcccagtgtccactctgatttttggagcaaagttgaaactgagcctgggtgctgtcgcaacccagctgggtgtgtatgtactctgggtggtgttgacatgccagacccctgtcatcttggccccctccagactttggtcaccgacaggcacaggagggaagccaagaggagactgagggcagctcagtgcaggcctgcaggcgtccctcagcatgcacagcctgggtgctgtggatgccatgttgatggtagcaggaggcagacaggctcctgggcagaaaggggcaggtcccaggtgaaacaccaccttcaacccagggacagcctgaagcctgggggccaggctgccagttccagggggagtccatggcctagaggaagaacttatggtgctttatccaagcccatccatggccatccatggaccaatcagcacacacttcctcccttctgagcccataaaaaccctggactcagccagacatgtaggtgtcaggactaccagctgcaggaaggagctacccactctgggtctccttgactctttgggatgacctaactgcagaaaggagctacccactatgtgtcttctctgctgaaagcttgacattcactgggacgacctgcctgtggaaacgagctacccactgcaggtctcctgaaagctgttctgtcactcagtgaggctcctctctgccttgctcaccctccagttgtctgcatacctcattcttcctggacatggtacaagaactcaggacccgctgaatggtgggactgaaagagctgtaacacaaacagggctgaaacacaccctcctccctccattcaccacgttgcaggtgacaagaaggagagaagagctgtggcccgttgggaagcccagatctaggggctccccaagccagggctgtgacaccttctttgggactgcacagttcctggtgtctccaagcttccgggtgccaccgtgttctcctagaacatttctagatgtgttacttaggaatgtggcagctgtcttgcttcttcatccagacatgggtccagaaatgggtgcctgcagcagaagccatgtgtggtacatctggtccagccacagactcacatggagctggcacctgtgccagtgcccggagctgtccatcctgtcgcagcaaccagcgtacctggctgtgcacagtggctggaccctgtgctagctcacccacacaccccttgctgcttcacgcctggcttgcccttagcaggtgtgtgatctaggctggtagcataagctgagcacaacctattgggccaagtgggtgacatgagcccagcaggcatgagcaatactcaggtagaaggcgctgctggccacagaggtgtctggctggcaaagtgacacccaaggatcctgtgacatcaggatctgctcacctgcaaaatgctggtctcacctggggctgtagtgttgcctggttgttgagagctctgtctctaggggacaatgcctgggtttgtgtcctggctctaccactttctagctgggagaccttgcacaagttcttaactcctttgtgtttcacattttcatctgaaaaattggggtaataatagctcattcagtcttcattaaaagcttaagaggtaggttttttaattattgttccaggctttgcttgagctgagagggccagcgagagtcaaggtataggagcaattgagcagagagagtgtatcagtcagtttttgctgtgtaacaaaaccatgaaatggcataagagcattcattcagatttcataggtctgtgggtcacatgtggtggttctggcttagtctttgagttgagttggccctgactggagggtcacaggctgcctgaagcatgtttttctcataatggaggtcagaagctccccgaaggacacaaagctcttatgattatggttctgaactggcatcttgacacttcttcccacattccattggctaaagcgtgtcacaacatccagtgggtgaaaaaatacactcccacttcgagagacgaggacgagggatagagacccttgtggctcccatacccagccttctgccagtccgtttgtacttgttctccagcaagaagctcaacagacatttctcaattggtcataaatctggtacctaggaatggtgctgacctcttgcaggcctccagggaggtcctgagagtcccatgagagtcgactttgctttgtcacagagcaggacaagtggccattccatctgcaataagacccttctaaatgctctgcaggaactcctgatgcatccttccagtgcccctttgaagtagctgccactttaagcatcaccatcttcactttacagaggaggaaatgaaggcacagggaggttgagttacttgcctgagggtgcccagcaaagtgggcagagccagattgaggctcaggtggtttggctgtggaatctctgtactgcttctaagggtggagaaagcaacagctgcacacctttgtgacttgtgctaggacagaggtgtgcatgggggtgtggcagtgtctgtgaattgagacctggaccctccagtctcccatgttctctgtggtgtttgggagattagcaaccccccacagaagagttaggacccacttcccctgctcttagaagccacgcaactcccctctcagcagggcagaagggagaggccccttgctgctcgccagggccctgggccaggtgggagtgacagagcgcagccccatctgtttgaaattagaagtgaattgagcacagttgtccagaaactccatgaagtttagaaacaccgtgctgaatgtctcccccagcaaggctgtctcttcttgagagatttcatccctgtctcttccccacagtgctcattttcttagcaccttctctgccctcggctctagggacagagacagtgagatgagccccttccctcgcctggtgagggtgttgggagcacaccaggaggccagagaaggattgtactccagggaggatagtggtggcaaaataacgacagtaattagtgtgtccatttagtgtgtgcttgtggagtgtcacgtgcttaacactgtgccccttaggccagtgttatgtttgtcttcagtttttggatgaaacccaggatctcaggggttaactagcaagaccctgcggccaccaggtgactctgctggatatgaacgtaggcttttctgtgccagcgcctcagcaccctggaccagctggggtacagggtaaagtactctgagagtcagatcagaaggcttaaggtcccacttactgctctgccccacacaggctgtgtggcctcaggcaagtcagttgacctctctgagcctcagaccctcagctatgacttggaattgcaacacatctccagaggggtagagatcaaaccacactgtgcctgtgatggggctttgaattaaagcagggaaccttctgtgcctggagagcctcagcatctaggggcagtgtcctgagccaccattccagggaagccatttgcaattttttttagatttttaaaaaatgttgctgggtctgcgtttttccacatcctctgaactttccttcctgctagctttctatattgcttcctactttttctctgctttgggtataagcttctaggaatagaattttaaatcttagatggcttccccattctatatagctcttgggagtgctcacgtcaaagacttctgggaggctttctgcccagagttgggctgctggagaagattataaaggcaccaccatttttaaggtttttgttttgttttgtttggaagtttggaagtttcattcagaaaagtaacccatgaccactgaaacaaatcctgaaaacagagaaaagtataaaagctcaagacagaaacagaaaatcctacagaaaccactctcccagaaagtacctatcttagtagttcatactgttttctttcacggcattttggttcctctaggttaacatatactaaaattggaattataattctgaaatgcttttctcttttcgtttccaatttaacagtgtagtagatattcctccgtgttatttaaaattcttcatgatcattattaatgattgaaaacttctgtcctgtaacagatattttaacatatcatggtttaattaataatttccttaatgtggagcatgcaggaggagctctctacattttgctattaaaaataacatgataggcctgggggcggtgtttcacgcctgtaattccagcactttgggaggccgaggtgggtggatcacgaggtcaggagttcgagacgagcctggccaagataatgaaaccccgtctctaataaaaatacaaaaattagctgggcacggtggcaggcgcctgtaatcccagctactcaggaggctgaggcaggagaattgcttgaacccaagagatggaggttacagtgagcggagatcacgccactgcactctagcctgggcaatagagcaagattccgtctcaaaaaacccccaaaaattagctgggtgtggtggcacacacctgtaatcccagctacttgggaggctgaggcaggaaaattgcttgaacccaggaagcggaggttgcagtgagccaagattgcaccactgcactctagcctgggcaacagagcaagactgtctcaaaaaaaaaaaaaaaaacaacccacaaaaacaaaaattagctgggtgtggtggtgcacacctgtaatcccagctacttgggaggctgaggcaggaaaattgcttgaacccaggaagcggaggttgcagtgagccaagattgcaccactgcactctagcctgggcaacagagcaagactgtctcaaaaaaaaaaaaaaacaacccacaaaaacaaaaattagctgggtgtggtggtgcacacctgtaatcccagctactcaggaggctgaggcacaagaattgcctgaacctgggaggcagaggttgcagtgagctggaatcgcaccatagcactttagcctggacgacaaagtgagactctgtcaaaaaaaaaaaaaaaaacccacaaaaaataacatgataaacatctttgggcacaaaactgcacattgagccatttcctggaatagactccgaaaaggggaattacgtatgcagtagaaggaaagagcactttttgaggcttttgatacctcaagcaaatgtccttttgttctagactggaggctatggtggggtgggctgccagagaccctgcttccctgcaggggattcatgtttctgctgaacaggggtccaaacccatgagctcctggctcaggaaaggtcctaggtgggcccatacccaacagcttttcacagtgacttgtgagaagctctaggagtcctgatgatctaaattgtttcagttgaaagtggaacaactaggagcattttgaaggcagaagtgtcaagacgcagaaacttctgtggtgccagaagagggggctgcctccagcaagatggaattcaccacggaatatataccaagcagcgtgtgggcaggtgttgtgcacaccacaccccgctgcgagttgtccccggctccagcctctctatgttcctccctatcagctgacctctacacactcatttctttgcatagtctctgcctcccctagaatttcagctcccttcatctgttttgttccctgctgtagacttagcccccacaaacgttacctggcccattgcagctgctcagtaaatatgcgtgggctgaaagaatgatgagtggggaagattgtaaagacctgcacagaggtcccaaaatatgatgcttgtaagtaagaatccttgcccgcattcctttactgggttctttttgtttattttgttttgtttttgagacagagtctcactctttcactcaggctggagcacagtggtgcaatctcagctcattgcagcttctgcctcccaggttcaagcaattcttatgcctcagcctcccaagtagctaggattacagacaagtgctatcatgccccgctaatgtttgtattttttttttagtagacatggggtttcactatgttggccaggttggtctcaaactcctgacttcaagtgatccacccacctcagcctcccaaagtgctgggattacaggcgtgcgctcccgagcccggcctcctttactgagttcttaatgtgtgcctggcatgtatctctcggacacttcccaggtaattctgttatggataaggtgactactgtcatcccatttatttcctgactcatgccagcttgacattataataaagtatttcccccatgctattttaaattctttgtgagccataatttatcttcctttaacatacataagaacattctggaatttgctcagtagcttgcacagctctagtatttacccagtaatggaattgctggggcctagggtgtgcctgtgtgtaaactgcctctgtacctccaggtacgtccttgcacctgtacctccattagctagtgtggctaatgagtccacactttcactcacagggcatgaggcatgagtgtctgcacatgcctgctaacacttggcatcactgtgccttcttggcatcacagtgtcttctaatttttgccaggctagtaggtgtcaaagatgtcttattctgtttttatttgcatttctgattgctaatgaggccctagaccttcatgcctgccctgcctgccctcaccaggcccctctgtcctccctttccctaccctaccctgacctccatgtctcttctgcttacccttcagaatttaacatagacagacgtttgcacctccgaggggctctaatctcaggcctcctctcttccctccacgggctgcccgtgtcaatagcagcctgaggtcgtgtttacagattctcctccagagccttgcactgctgggatcagagtctgctccagcacctacaggctctgtggccttaaccaagggccttaatctctctgagcctcagatccttacttgcaagctggggattaaaaatagcacctcctagaagacttttcttgagaattaggtgggataatttattcaaagtgtttggcgcatagtactgctgagcaaatgtagcttttgggttttagagtccttgcagtccttgcttgtcactatgtttacctgaccagcctccaagcctagggagtcctcctgggtggggctgtgtttgctgcatttttgtattcccagcttccagcagtgctgggcaaacctgaagtccttgactaattggtatgtgtcagtctcgctggataagatttaagcatcaaatgaagggttgctctagatgcccttttaaaagtcttttccaaccctgaaattctctgatcaggaaattatcaaggaaaaagttctccttgcaggatcttttctaagatttctaaatggggactttattacacggggcaggtaattacaggaggctgcagctgcagcagagagcttcacatggctggtggctgattggtgcattttggaggctgtcatctttgttctgactgggggattggaatcctggcagaggcagggcctctcccttagcagtacagtggaaggcagccctgcaggacccaccctcaagctggtcagccctccactgactgccccaggggatggcaggcagcatctgttggcatgtgaatatcagacaagtcatggacagtaggagcagaggtgaccgttggaacactcagcccaggagtcagtttcatatatccccaggggccacgtgggtaacacaaatgggttgaaacatctgggcaagacagtagagagcagtggggtctgcagtgaattgtaaaactgactaggtgccaaccaaaggagatggctgccactcagctctgtgagatcgtcctatggataatgtgagctcagggttcctggatcttccccacctttttcaaaggtagccagaactctagatttttatgtaaaactttctgattattgttgcacctaattcaaagttttgttgtgctctacagtgcagacaaaacatgcctgtggggcaattgttttcatacctctgatttagcccagtatttgacaggttgggaaactgaggctcagcagttaaggactttccagaagtccccagggagttagtgaccatgatggacacaaagtgcccaagtctgggccgggcgcgttggctcatgcctgtaatcccagcacttgggaaggccaaagcaggcagatcacttgaggtcaggagttcaagaccagcctgaccaatatggtgaaaccctgtctttactaaaaatacaaaattagccaaagtgggttggcacgcgcctgtagtcccagctacttgggaggctgaggcaggagaatcgcttgaacccgggaggcagaggttgcagtgaactgagattgcaccactgcactccagcctgggtgagagagtgagactctgtctcaaaaaaaataataaaataaaaaaataaaaaagtgcaagactgggtgagttatccaccagtttggtgggctcttccccagcacctttattcaaggcagggactaaagcttagaggagtaaagggacagggacttgctcaaggtcacatagcttggaacagcagaatccagagaaggactggggcttgctggccctcatccatgggactgtccagccactgtgttactgaaaacgtccccataatggtttcaataaagtcctaaccaggaacttggcacagggcaaattctagcctgctgccaatcagcaggaaaacagctcttatgccagtgggcaggaagctgccaaggtgtcacttctgctcagagaaagtggtttgtgtatttgctgaactaatatgttcaccctgaaggtacagagatcaactctatctctttctggagggtccctccagctggatgcctggagtctgatttgacgacattccttttgcccttgacctggtgttcttagagagcctgcctatcaaatctcataatcagtgagggatgttgattcttctttgtgatcgggcacatgacttaggaaacaaacctgggcttagagttatgagggttgtaagcagttccagcttgcagtgttttagctgtgacattgggctggccacttttataattgctgccctgccagcctcacagagctattgtgagactctggttgaatggatggatctaaattgccaagaaaacagctaaagaaatgtaaactggttttggccttatattcctcctccttgaaggatgacatttgagctgggacaggaatgataggagggagccagaaaattcagcaagtgcaaaggcccaggggcaggaatgagcttgattccccaagaatggatggggagtgtattagtctgttctctgcattgctgtaaaggaatgcatgagggtgagtaatttataaagaagtgaagtttatttggctcacaattctgcaggctgtacaaaaagcatagcactggcatctgctttttgtgaggacctcaggaagcttcaagttgtggcagaagaagaaggggagctggcatgccccatggagggagagggaacaagagagaggggagagtgctcataataaatattgataaaattataccttctaggcatagcagggaggatcagtagacttacccccattaaaggcataataaggaccagtgcaatggctcatgcctataatcccagcactttgggaggccgaggtgggtggatcacctgaggtcaggagttcaagaccagcctggtgggtttagtagaaactctgtctctattaaaagtacaaaaattagccaggcatggtgataggcacctgtagtcccagctacctgggaggctgaggcaagagaatcacttaaacctggaggtggaggttgcagtgagccgagatcgcaccactgcactgcactccagcctgggtgacagagcaagacaccgtcccctcctaccaaaaaaatagacataataaaagctaacataatatttatataaatagagggcatttggtaattatgatttatcacaatctactgagttgaaatcatttgttttggtttaactgagtaccaattcattctaacctcttttgggcttactcataggctaggcctaggattaaaataataattagtatgagagctgtgctaattattaattttaggttgcttgtctggaaaactcacggtaagggtaatagtaagaagatttctccatcaaagaggagaaatgtcatgacttctagaaaaaactttatggaaaaggggaggtggccagagcctactgggtcaaaacctcattcgtaggggctcttttaaacaatgagaacccttgagaactagtagagtgagcactcactccttacccggaggacaacatcaagccgttcatgagagatttgctccccatgacccagatgcctcccacagggccccacttccaacactggggatcacattttaaggtgagatttggaggggacaaatatccagactatatcaggagctgacatgactgaaacagagtaagggagaaagcagtaggacaaagcagaagggggctgaagtcttgccaggagcagggtgtgggcccaggaggcctgctgcctggcgtggcatgggagcgagctctcttgcaagatggcagtgaggacctcgtcctcggaggcaggcctttccactaaggccaggaccatgatgggagagcagagaggtccagaaaatgaagaagctggcagagggtgggggagttggatcaccccaaagacatcatcaggaagggaggggcaggtcatctgggctgtgaaatatgagtagggtttgtctgggcagcaagagggagatggacttcccagagggcttggcatctgctgggggagcggggggccatcggaggacggcacatggcaatgtgtggtgttgcttccctcctgccttggaagctgtgagtacccccacaggattgaattgaaggcctagaaccctggatgggaaaaaccaggaacccaggagatctcgagggtcttagcgggcagacccatgtgatgtctgaaccctgaccctccccacctagtgccccaggattgcagaacacctccttccttgtagccttgctcatttgctcagaagtcaaggcccaggatggaatctcattgcctgagaatgcaggagtacgaggagcttctagggagcccttgcttctgtcgtgggagggcagcctgtgcatttaccatcccactaggagagcatgcggtggaggagaggtgctccccaggaaaggactggcggctgtaagatgggagcacaggatcctttgggagcagggcaaccccagcccaccctcaccctcttgattcctgcctgttccattctcttccatggcatggaaggagccctcaccccaggctccttgctggagatatgacggggagcaaatagctgtgacactggtccattctgagctcctgcagtgatcctaaagccaaaatgaatagtacccaatgcctgtggccagggagcttgctgtactgggtgggaaatggtcctatgaagaatgaactagggatgggtcattggtgttaatcttagatccccatgagtaagaaaggacatacctttgttgtctgtgtcactttgattattagtgaagtaaaactactctttgtagcctattggttgtgtgcatttcttcaatattgatttgccttttatctactattttaaaaaatttgtgttgtgtgcatttgtgatgatcgtttttgcaagagctctttgtgtttattatggatattagccaggtgcccgacatgggctgaaaatacgcttcctggtttgccatttagtttgcactgtcattcagggcatttagtctcttagcacagggatcaaaattttttcttttctttttttttttttccagacagagtcttgctctgttacccaggctggagtgcaatggcgtaatctcagctcactgcaacctccacctcctgggttcaagcaattctcctccctcagccccccaagtagctgggattataggcgcaagtcaccacgcctggctatttttatttttgtatttttagtagagatggggtttcaccatgttggctagactggtcttgaactcctgaccttgtgatccgcccgcctcagcctcccaaagtattgggattacaggtgtgagccattacgcccagccaaaacctttttctagaaagaatcagataataaatattttaggctttgagagccgtgccatctcagtaccatctgtttgtgccattggagcacgaaagtagccgtggacactgtgtacacagacgttcacatttcttatgtgttcagtcttttcttctatataaatatgggaggccttccgtactccaaaattaaatgaaagaaaaacaaaaaactagagaagaggaaaagtcctgaaaagtgatgtaagtgtaatgccccagcagtgatgagtgctcacagaagatgtactggaatctccttggatctcggtaggtctttagttctcaggagaagaggcgagagtgggcgctgctgcagacaggggcaaagtcacgagtgaaggccgaggcatctgggcctgggggagctcttcagcagggctggggtgggggtagcactccagaggggtgtcccctcatcctgtgcctctcctctgatctttattctttccactgacattgatgaccgtgttctctgaggacactgggcccattgtgtcttgagagacatgttcagccaaccacctggtcttcgtcagtcccagtgagaccccaggtgagaccctccagcttccttctatggaagccatcaggccccttcctcccctctaatccggaccctcccagagactggattgtcaggtttgatcttaaggaatcacatgtgaattttacacttagctcctctacccttttcttttaatgttgtttcaaagatgttcttaaacccagtgctgtattcaagatataactttcctatcctataactttgaatgataaactaaaaaacccagctggttttgcaaagggctttctgagtgtgagagggtcagatgggtgttctccctgtctcctcccgaccctcagtttggttggtctcatgacgtactggagaaacaggctcgggcctggaccaaccctgtgcggactcagactcacagctggccataggacctgggacaggcccttcacctttcaatggcctccgagatgatggtatgtgtgatgcttaatattgactgtcaactcgtttgattgaatgataaaaggtattgttcttgggtgtctttgagagtgttactaaaggagattaacctttgagtcagtggactgggagaggcagacccaccctcaatctgaatgggcaccatctaatcagctgccagcatggctaggataaaagcaggcagaggaacgtggaaggactagactggtagactggctgagtcttccggcctccatctttctcctgtgctggatgcttcctgccctcgaacatcagactccaagttcttcagcttttggactcttggacttacaccagtgatttgccaggggctcttgggcctttgaccacagactgaaggctgtgctgttggcttccatccttttgaagttctgggtctcatactgatccaccactggtttccttgattttcaacttgcagacggcctatcatgggactttaccttgtgatggtgtgagtcaattcttcttaatatttttgttttgttttgttttgagacagagtctcgctctgttgccaggctgtagtgcagtggctcattctcagctcactgcaacctctgcctcccgggttcaagcgatcctcctgcctcagcctaccaaatagctgggactacaggtgcatgccaccatgcccagctaattttttgtatttttagtagagatggggtttcaccacgttggccagaatgatctcaatctcttgacctcatgatctgcccgcctcggcctcccaaagtgctgggattacaggcatgagccaccgtgcctggccttctccttaataaactcccctttatatatacatctatcctattagtcctgtccctctagagaaccctgactaatagtatgtgactcgaaaggtctctagtgaaggtgcagtgagacaacttaggtagtatctattggtgtggcacgttggcatcactccggagcctggtgacctaagtttgggtgactgactttgctgcctactagctgtgtgccctggaacaagtgacttcacctctttgtgcttgtgtaaatatggagagatgataagtcacctactaatagattgtttggaagattgaatggcttaatccacatcaagtgtctgaaacagtgcacatctacatagctgggaaatgttagccattgtaggccaagggccagtcacatactaggtgttcaataaatacaaccacccttctgttattagatgtgctggaacaattccattacactaacttttgctacttttgcaagaaccacagatttaatgcctatctacctccccataagtactgttaattaaagtccccaagcccagataaccttgctttcctgtccttagcaagctctggctggacaagaatttttaaaatgtgtttgttgatcttttaaaacccctaagatgagtatttactgccaaaatgtgcaagtgtatcacaaggatttaattcaggcactagataataatgctggagatttaaagaaggaaaatgacgaggttttcatttctttgccctctatctgctatggctacaagcacttctgtttatcatttaaaatcctatttgaaaaggtcactggttatttgcgtgaatcatacagtgtgaggacttaggaaaaaagagccaaagattggccgccgcagtcacctgcttcattccctgtccttcccctgtgatggagtttgctccgagtctctgctgttctcagcttatggtggccaccatggggtacaggaggaccactgggtccaggcaacatgacgctgtcagtaatgatgagaaaaccagacgctgctcagagtgcatggagtttgtaaatccacttgaaattgggctggtgcaactgaggaacggtgctttaaattttattccattttaattattagctaattattttaattaattagctaattaattagtggcactaattagttaattaatgcaattgaaaaactgcattttaaactgaaattttcaatccactctcatttttacttgcattcccattttacagaggagaagtctgagcgtccaaatgctttagcactggtttagaattgcccggcatgtacatagtggacccgctctcttcagataggtgcagactatctctgaaagctcactctgcctcagttcctctctaacgatgtgcagcaggtattcaccaagcttccagtagcctgtgtttcacatgatgtgaggtgaaggggtgatggtatatttattggcctcgtatctgatagttgcctgcacattgtgcccagagaagccctttgggaagtggagctggtgttcaaaaggccactaattggcttattccccaggattcatcttcagttgttgaaatctattttttgaaaggcttaacctgggaagtcccctgaaaacaggtgtgtgatgcagtagggacagcgggaaaccaggggaagtttccagagagaagtgtgaagagccattctccattgctatttttttttttttttttttgagacagagtttcactcttgttgcccaggctggagtgcaatggtgtgatcttggctcactgcaacctctgccttctgggttcaagcgattctcctgcctcagccacccgagtagctgggaatacaggcgtgtgccaccaagcccagctgattttttgtatttttagtagagatggggtgtcaccattttggccaggctggtctcgaactccagacctcagttgatccacccgccttggcctcccaaaggactgggattacaggcgttagccacggtgcctggtcctccttcactaatttttgctgggttacattcactgccctccagagggacatgatcagctctgcttccctcactgacctcgtcctgtataattatcccttttactcagcacacctgtcccacaccggctgactaccaccagctactttccaccctgtgatctcccactggcatgtccctccgcctgagctccgctctcctcacatggtgtttgcaagcggctcactcaggagctcagtctcatggtccccctggtgccccacgccctgtcatttgcagtgatgttctgtgatcctcacaggaggcttgtgaagtcctattctcattttacagatgaaccttagagaggctccatagctaactcagagtctcccgtcaagtgaaacacaagggtggaacccacgtctgtctggccctagaccctgtgcctcaactgcacaaccagtgttctccgatagaactttcccagtgatggaaatattcaatatctgtactgtcctgttcagtagccgctcactgcatgaggctactaagcacttgaaatttggctggtgacactgaggaactgtgctttaaatttcattcagttttagttaattagctaattattttaatttattagctaatttagttaggaacactaattagttaattaatgagtgcatctgaggaactgcattttaaacttaaaatttaattttaattggaaatagccacatgaggctagtaactgtaaagaactgtgacaagcctgagatgtctccctatttgcaagctgacaaattagcctgctgacagatgctggcagaagacaggagcttcctggatcagagacaagggacttcattactcaaagcacagcgggcagccagcttgagtttcatacttgcgtcatttctgcttgcctctaagtcttatggggttttgtgcaaaagcatttaccattatctgcactgttttgtatgatgcacaagctttcagagagggactatatatttcactcctcattgtatctccagtatcccaaagagagcctggcacattcttgggacccaacgagtctttactaaatgaccaatggctctggttcctcacaaaagccaagagtctggactcggtggttatagaggatcctcccagctcttgagaaaggtctctgaatttgagcgagtgccctgcttctgagattgtctcttccttacagtcgctgcagagatcagcctcaaacagggatctcagtttcctccctgtagaacctgagtctgggactccgtgcacgtagattgcagaggaagtgttccagggaaacggtgggggacacagggctacgcaggggagctgctgagcagggatgtgctcccagctagagtcaaccttcagcctgatcccacggccaaccccagagcacaaactgtaccatgaggctgtcccacaaacctgaaaatttggcctggactcagggacatttgggagcctcagaagattataggcagcagaaaggaaagacaggaatccgataattccacataagaaacgtgttctggactctggagtccaggtagtttggtgtttgaatcagactccaggtggcagtagggaagagaaatgagtgtgcctccacgctgttggggaaagatgcctttttttcaactctagtacttaccatcagtgggggaaactgaaggaaaaggtaaaggaggccaaccctgtgtaaccccatgtccctctgtcattgtctgtgggctgcctagggtgtggggggtgagagggtgggcacctcccaggggaggcagctcctctgtggccagaggcagttctctggatcaagggacagctgtgagctgtcagcagccaatagtcacagcagctgaggggtggtggcccagccagaagaggcctctgggcagagtgccagcagcatctactctgcagggacccagcaccttccaggtagcctgaccccagctaaggaaatgaaaacctgaaacctgcctttccaggtgaagtggctccgagggtcaccgggcgtaatttgctacctaaggaaagtccagtggttcttgattaccatcccctgccctccatgctgctcaggtttcctgctcgtcctttgggctggcctggagaagaaagaaacaatacgtcttcttttcttcatgtccctacaatgtgccaggaactctccaagagacttggcctatattatctcatctaactttcccagcaaccccgagaaatgggcctggtaatgcccgtgcctgcaaggtggaagccgtggctggcagaggtgaaataccttcctgggaataccttcacagctaggaatggcagtgccaggactcgaagccaaccctcctgggccaaagcctatgctcttccctaccatcgccatgggcgtgggttggggggaagatgcatcacaagactgtgccttcctgttctttctctttctccaggcagacccagaaggcactgcaggacttcagagagcaaagagggaagtcaaggaaccttatcctgtggtttcctctactgatgagtagtggagttgagaatgtccatctttccccaacagcatggtagcacactcatttctcttccctactgtcacctggcatctgattcaaacaccaaattacttggactccagagtctagaacacgtttcttatgtggaattcttggatttctgtctttccttcctgctgcctataatcttctgaggctcccaaatgtctctgggtcaaggactaacttgtaggcctgggttttgaggtccctctgcagtttgccaagtttctttatttttatttttatttatttatttattatttatttatttatttatatatttattttttagtagagacagggtttcaccgtgttagccaggatggtctccatctcctgaccttgtgatccacccacctcggcctcccaaagtgttgggattgtaggcgtgagccaccacacccagcccagctttttttttcttttttttgggacaaagtctcactcttgtcccccaagctggagtgcaatggcacgatctcggcttactgcaacctccgcctcccagattcaagcaattctcctgcctcagcctcctgagtagctgggattacaggtgcgtaccaccacgcccggctaatttttgtattttaagtagaaacggggtttcaccatgttggccaggctggtctcgaactcctgacctctggtgatctgcccacctctgcctcccaaagtgttgggattacaggcgtgagccaccgtgcccagccgcagtttgccaagtttcttccaaccaatcctatctttcaaggttgcccatcaccatctcccactgtaatacaaaggagatctgccatttatttgcttaatacctaaaaatatttgctcttatttagggagcccttgccacatgcccaagctgggcagatcgctttgtacgtgttgtcttgtgtgagcctcacaaggaccccatcaggtcagtcctgttgttctcatcttacagatgaaaaattggaactcagtgaggtataataacctattcaaagtctcaaagccagtgaggaatagaacaagggttaatgcaagtcagtctggcccagaacctgtgctctctacttctcggtcagcactctccaatagaactttcctgatgatggaaatgctctatgtcggtactgcccaggtcagtagctgctagccacatgagactgttaagcacttgaaattgagctggtgcaactgaggaactgttctttaaattttattctattttaattcagttaatttaattagtggcattaattagttaattaatgagtgcaactgaggacttgtattttaaatttaaaatataagtttaattagaaatagcaggtgagtgcggtggctcacgcctgtaattccagcactttgggaggccgaggtgggtggattgtggggtcaggagttcgagactagcctggccgatatagtgaaaccctgtctccactaaaaatacaaaaattagccaggcatggtggcacacacctgtaatcccagctactcaggagactgaggcaggagactcgcttgaacccaggaggtggagattgcagtgagccaagattgcaccaccgcactccaccctgggcgacaagagtgaaacttcgtctcaaaaaaaaaaagaaaagaaaagaaagaaaagaaatagccacgtgaggctagtagatataaagaactgtgacagacctgagatgtcaacctatttgcaagccaacaaattagctcgttggcagatgctgacaaaagatagcagcttcctggatcagagccaaaagactttactccagcacggcaggcagccttaagtttcatgtttacatcatttctacttgtaccccaagacccacgggcttgcttcatagatgaggaaccacaatcttttattataatgggctgcaagtgaacctactcaacttctctcttggagggaggcattatctttatgatactggagagtaagcacacctgagccctgctctggaaggagacactatctctatgttccaggctctgtgcctccttaaaaaggtagttcagaaaagaaggctgtcagtgcttctgcttgcaagacacacagaagtgcaagagacccatgaagaattgtctgtcaaccatggatcctgcattggatactgcaactccaaattgtctgcagtgcctgttctgggatgtttcacatgtactacatcattgaccacccccaggtgtctgcagagttagcccgtcttttctgtttagcagatgaagaaactgaggctcactctcacccaacttcctgaacttcgagatcgtggattctcctccccattaccaactctttctacttccccctagatcccccgaaaaaacaaaaatctggaatgtttgtcctcctcactccttttcaaaactttaccctccaagactagaattccttttctcttctgccttgtcatcttcttcccattttccagaagagttgccagtctgacctcctctccgaagccttccctgcccagcccaacctatgctgaattcccctgtctcttctcgaccatagaaggtcctatctcatactcttgagtggaagctcttgagggcagagcctgtaccttcctgtggccactctcccccagcatggcctatctcaggacttgggggaaaaacaaactaacaaataaggactcaaaaaaccaaaccagaaacaagcagctattattttatgcctgggattgacttcccacttcactacccactttcagttccaggccccaggcagtgggtgaatgggcttgattctttcccagaaacgggagatgttttgaaatgactcaaagaaaagctgattggattggattgagttttggtaaatccacccacaagagcagagaaacttgacatttgccttccaagccagcaaaagggatgaatctcatttccttctaactgagcaggaggcccagcgatggaatgatgactgagcaggtctcaggagactgggttctagtccaagttctgaggctggctggctccgtgaccttggggaaggcactgcccttttccaggccttagtttctcatctatgatgcaggactggaggagggggagaggagtcagactctccagatgccctccctccccaccttccatgctgggcttcagtgatcctccaggctgggaaagcccagccttcacaggaacccagtgaagttctgctcctcccagcctcctttctgccacctccctgagcaggaccagcctcccctcctctccatgtacagtgtagacatcccacactgcctggctgagggagcacctactgtaaggctgtgctgaaagagcagcacttgattctaatccagactcctctatcttcagccctaatgcatcacctcatcgtaaacataattcacagtgctgccatctctgcctttcaaggtgggcagtgcatgtttttttctccactctcgttcagttatttttaggaaatgccatgtagttccatatacttgacatgtacctgctttcactacatctggagatattcaggaaagtccttgataacgataaggcctagggtggagctgcgacgtacttgccatttgtaaaagccaggcagaagagtccatgcgggttagacacagataaggaaaaacaattgatcaaagaacaattggcccagctagggtggagtttcttaaggcagccaggaagtggggggctggacagagggaggaaggaaaggaaggagggagggccttcaaggaggggtggcggagatggggcggagggggagcagacagtggatcctaattgttacaggcactgaatccttacaacagccccagaatgtaaggatgcttattatccctgttttgcagatgagaaaactaaagttcagagatgaaatggcttatccatggccactgagctgcaaaatggcagagcctgagtggaagtcggctctcctgactatctactcagttcttacaaatcaaacgtttgttgggggggcgttagaatacttgcaaaaggaactctgtgtttgtcagctttgctgcataacaaaatcttccaagctcagtgacttgcaacaggtgtttatttcttgttcgttacaagtgaaaatgctgtgggtaacctgcaggtcagctgtggctcagcaatgctctgtgaattttctcagtttaaggtccagggtgaaggtagtcgctaaccaggacatgctgtcctctaaccagaactgaaagaactacttagtcagatttcagctttctgctcagagatggcacataccagaactgcacacactctgtcaaccaaagcaagtgacatggccaagcccaatgtcagtggagcagggaggtatactgtctgtcctcccacagtgagaggtggaggctgctagaaggggaataaatagttgcataatgcagttggccacactgggctctgcagacagatgcctgggtctgactcctatctctgtcacttaatagttgtagtcatatggccttcagcaaagtgcttgaccacactgtgcctcagcttcctcaactgcaaaatggggatgataattatagtcctgcattaatttgctagaactaccataacaaaatatcacaaactcagtagcttaaacgacagaaatttattttctcacagatctggaagctggaagcccaagatcaaggtgtcatcagggttggtttctgatgagggctctctttctggcttgcaaatggcagccttctaatttgtcctcacatggctttcttatgtgcatatggtgagagtgctttctggcacctcttttttttttttttttataaggacatcaattctagcagattagggccccaccattatgacctcatttaaccttattaccttcctaaaggccttatctccaaatacagtcatcttgagggttaaggcatcaacatatgaatttggtgggggtgtgggggacggttcattccatagcaagggccaattctgcagggctcttgtgatgatttaaatgggttaggacagcgtctggcctacaggcaagcactgaataagagctaagctgctcttagtaccccagggatagcaggccccacattatcatattggctattccctgcactgataatgcctcatttgctttctttgtcctttggcaacctctcccaattcctggcataaatgaggtgaccaggaaatggatgcttgagtcccccggtgaatcctgaggcagttgacagaaggcacgcagggtttgaggtgccctgggctgcactccctgctgtgttgctgacctgcttggagactttggccaagccaccatcttctgccagccaggatgcacctcattaagacaaggcttgttctgcccacgacatctcagcagatttcatttccccatggccttctgtggctattcctacgtattgggtagtgctcagagccaaagtcctagagatttttggttgttgttgttgtttgtttgtttgtttgttttgagacggagtttcactcttgtcacccaggttggagcacagtggcacaatctcggctcactgcaacctccacctcctgggttcaagcgattctgctgcctcagcctcctgagtagctgggattacagacgcctgccaccacacctggctcatttttgtatttttagttgagacagggtttcaccatgttggccaagctggtctttgaactcctgacctcaagtgatccgcccacctcgaccttctaaagtgctgggattacaggctgaaccactgcacccggccagagagattgttcttttacataaatgttcttatagattccaaattgacagtacttctccaaaccctctcccacagctactgctccccacctcaagagagcacctaatgaccctgccggatagggctgggctggacgggcataggagaacttactctagctgcctgtgtctggggcagtttctggttatgactaggagcctgagtgttttcctgctcttgagtagccacccacagacacagaacgacctaggcttggggtgaactcttgggattccatggcaacactgaaaaaccctgtgttgatttttctatcctcgctcatgttacctttcccacatctggccttgcttagaaagaacgatgtctgaggctgtttgtttattagagagctctgttagccgaggagagacagattaaaggccgtggggacagccaagcctgtccaagtccccttgcctggtgtggctcagcccagcagtgttaggaaggaaagcaccaggtgaaagttcttggtgccctcccagctcactgctaattcattatttgtatgatgactaattcagtgcatttttgaccttctcagtctcaacttcctcatcagggaaacaggaacaaagatacctcctgtgagatgtacagcatctgacccagagtagaaggtgatgatgatgatgaagatgatgatagttcagccctcagggagcatggctgagaggccaggcatgctttacgcacttcatattcattgatcctcttaatcttcttggcaaccctaggaggtggggactactattctttttctttacagatgaggaaactgaggcacagtgaggttaagtgactcctagcaggatgtacagccagtgaatgacagggctgagaattggacccaggctgtcttgcttcatagccccccaccctcatcactgccctcagacccaggtgacattagttatgttaagctgtgtctcctccctataaccttccctgcagtgttggggaaaaggacgcaaagagcaggtgttgcttgttctgaaaagtacttacttgtaattatactaaaaatgtccctttcgagttgtttctttagagagtcagaggcagggcagccccaccctaggcacctcctccctccttctggcccccgtgggcctcttggtgtgatattaacgtctgagggcctcagactcatccattattgatggggcatggggagagggtgagaatgaggcccaggcggtcttaacagctcagaaagttctttttatccctgtccctggtggaaaagtgcattacaggtgacaggagcaaaagcagctgtgaccaaagctgctgccagctgtgggtagagcatgattatcatttgttattgccctcaactgagcaccctcttctcattcaagatttaggaaaaacattacaacaatgacaacaccacttctctgatcttgagtcttagattcacgtctctctgttccttcgcaaaatgcctagctgtctgtttcctgccagttagaagaatatgccagactcagaactacctcccgcccctgcccagtgagatctgtgacctgcccccagccctgttgcgagtgcacacgcttccttggggatgggggtgggtgagaacagcctttgacctgcagacctggattccagtccccattctgcccttgctccccttagtacgccgagctgctcgacctccgagcttcggtttccttgtgtgtgatggcgaggctggagctaccccaagggactgtcatgaggctaaataatgtatgtgaaaggccttaacccagtgccaggcacacagcaggtcccagaaaaaggatgtgccatcctctcactttctgtctaccccacccatcctcatccttcagggtttgagcaagagccctttgtcctggccctctttgcctcattcttcccccatttcggtgttttgcatgttgattaaaactctctggggcaggctctccaaatttagcatttttacaacaggaagtggtcttagagatcatgcggttcagagctttctgtttgcagtttgggacaggaagcttctgcacgtaggtcccctggctcccatccagtgctctttaggtgactctcttctctccccacactgagtggcttgaaagggctcagaggcttcacatgagcacttaacatttactgtgtatatctgagccaagtagggaaagaaactgtctcaccaatcctcacgccctctccccatgctaagtctcccgagtattttcttctgtttttcagatgaagaaactgaggttcagagaggttaagagactccactgaggtcacacagccggtaagtggcagagctgggattcgaacccagctctctttcactccagaacctgtgctctaaattgccttgctttctttgccttaaaaaggggagacctgcgactttgttttctgttttgatggtactcacacagattcctgggttgaaaggagagggcccctgggtccaaaaattcagaagggtggtggcatttgagaaaaacatccccattcccagtgggtgccgtggccgggacaaacccggagcttaggcgcacctgggttcaggatcgagctcactgtagccagcaggagcctgggtctgttctcccaggagggttgctccgaggccccaggagctctaggaaccagacccctgggaccccacagcagggcccaggtgcctcgtcgtgtgctgtgtgcctcacattctgcctcagccacagaggagcccggcaggcaggactcaatctcactcagcaccactctggatggttgcgtagttacaccgtgtggtttgtagtatttttggttttgttgtttttgcaaaagccaaaggaagtctgtgggctgagttctaccttcccttctttgaggatagttggtctgctcagtcagggacaagcagagctcagctagagaaaaaaaaaaccctccaaacacgaggttgacagatctgagggcacctgccctagctggacaccagccctggctgttcatgggcagggctcattggaagtttcattataatcatcccattttccagataaggacactgaggcccagaaacaaccacacccccacctcttgggaggcacaaatcaaaatgaatctttgctccctgagtgctgagcgctttgctgtttcacagctcgctgtccctgcagtccacatgtactcattgagggcctaccactgctcccagcaggcacacagcagtcagggagtcggatgaactgcctgccttctggcgggggaagacagagggacagacattcagtccactgtcgagcgccagttcctgatgaaggctgtgaaggggaatgccacagaacaagtggcagagacagcgattttagggtgaccagggaaggcttctccaaggaaggcatttggacagaaacgtgaatgcagtgagtgagcaagccatatggattctggggtaggaacagttttggtagagggaacagcaggtgcaaaggccctggggcagggagtgtgcttggtgtaacatcccgctctttgagtttgattctctgggtgtttgctcccataccccgctaccatcacagtggctgctcacctctagtatcccttccttagttacctccaagtgtctgcaggaatgtggcagtggggtgggggttgtgtagcaagaaaaatccgctgggcatggtggttcatgcctgtaatcctagcacattgggaggccgaggcaggcggatcacctgaggtccggagttcaagaccagcctggccaacatggtgaaaccctatctctactaaaaatacaaaaattagccaggcatggtggcgggctcctgtaatcccagctactcgggaggctgaggcaggagaattgcttgaacccaggaggcacggaggttgcagttagccgagattgcgcccgtgcactccagcctgggcaaaagagcgagactccgtctcacaaaaaaaaaaaaaaaaaaaaaaaaaaaatccaacaaaattgcatgggagagaagaaaggtgtatctctaataggaaactacttgtcttagtccttaatcctctttgcacaatttctgtgtttggtgaagtttgcaatggttttgtcttcttgctttgcatgtgttctcaaaatgccttctttaactaaggctgtgagttcacaggacactgcagtccactgtgtcaggcccgtctttccaggcagggcaggaatccggattcaaaaaccacagaaatagcagaagaaacagttttggcaactacactgctgaccttgtgctgagctcagggagggaggtgcagcaggcagacagggcccaggtaggggtgcagtggctgacagacctctgtcttggcacagccattaggctcaggcccctgtgtgcgggctcaggtccctccttcatcacagggtggtattggcaccagcctgggggagcagttcatggggctgggtgtgctggaagagacgtgctgagaagttagggaccccaggttctctctgactttgttttctgtttttattttgctcacatagatttgtgagttgttaaaaaagaagggctcctggggccaagaactcggaagaggggtggtatttgggaaaaacagccccatcccccttgggtgccgtggcctggacaatcccagagcatcagcatacctgagttcaggattgagcccattatggccgagagaggccctggtccccgtctcaggaaagttgctccgaggctccaggcgctctaggaaccagaaccctgggctccacagcagggccaggtgtctcctcaggtgctgtggtctcatcttagtgccacctcagccagtgtacaaccttgggcaagtcacgccccctcctggagactctgaaaatggaacagaaaggtgtggtcatctgtgtgttcctctgtgatctggaaatgctacaacctttgcttctaaggcaggtagtagccaggcatggggacggggcttctgtcagctcccctttgattttgtagacctctggctcttagcaaagagatgtcctaggaaggaagggcagtaccttggtgatcctgtcttgcacatatagactggagcttcagcccattctcacctctccttcacctgagacctgtggctgcagaaccagaaactcatttccagaagcagcagaatgtctctctttccgcagggctcagaagtatgtattaagccttccattaactgcatcttactcagctggaaaaataatactcaggatgcaattttatctgatttctggcctgtaagctcctgaagggttctcttaagaaaggctcaaaaaactcctgcgctgtgtgactcggagcccagccctgtagcctccctccaaggagcaggcagctcagtggttgaccagcaagcccatcatcattcagcactactgggttatccatctgtccatctgtcaattaaacaagtgcttatgagggcctggggccaggggcacataccgagattactaagactaaataagacacagcgtgtgccctccacagcagttcaggcgcaacctgaccactttctctatttggttaaactccagaaagttcttgactttattattcgcagttcaaaagcagcatgagcttttgtgtctgctccccttcacccactaagtgtcatgacgagcaggcagaacgcccatatagatgccacacatgctatgggttacgatataggacaggaacaccgagcttggggtatccaccatcttgtggcagacagcaagcaagccagctttttgtctcagagggaaacattacctcatgtctcaggattggttgctgcaaacccaacccaggtacagagcagtcagagccttgcattctttgtctacccagcaagatgtgtaggaatgcaagaaactcatggagaagtgtctccaaacaatgcattagcattgcacatgtctggatttgaatcctacgtctaacaatttaagtgcgaaattaagtgcgaaattgggtaaattgcaatggctgaacttctcagcctcagtttcctcttctataagatggggataatgcctactttccaggtgactgtgaaagagagtgtagggtcactcgtctgggaacacagtagtgaactaagaaagcccttgagttcaagaaacttagttgcacggggaatcctttcagctatgtattaagtatgcaatgccagttagtcatgtgtgtggaaaagaatagaggaggctgggcacggtggctcatgcctgtaatcccagcactttgggaggctgaggcaggcggatcaccaggtcaggagatggagaccatcctggctaatatagtgaaaccccatctctactaaaaacacaaaaaattagctgggcgtggtggcacacacctgtagtcccagctactcaggaggctgaagcaggaaaattgcttgaacccaggaggtgaaggttgcagtgagccaaggtcgtgccactgcactccagcctgggtgacagagcgagactctgtctcaaaaaaaaaaaaaaaaaaaaaagaatagaggaaaaacgcagaggccgatacacatcatggttcagggacagttgctgcaaggatttgccatgtgacccagcaccctgaattgagtaaaggaatgaccttactacctgtgggaagagcattctgggcagagcagataggctgtgtgtaggtcctgtgcttggcctgcttgagggacagcatggaggctgagctggagtgagcaaggaaaagtcgtggaaaatggaatcagagagtaggcagggaccagttcatgtaggatcttgcaggccttggtgagagccttggattgcattgtgggtgtgcagagaacccactggaggcttcaggtaggtaggggcataagcagaaaatagcatggaagaggccaggagaggctgcaaggtctgggatttgcttttatcctgctgctactaacaagttagcctgttagtgtttcatggatcctggcagaagacatgagattcctgggtcaggagtgttgtaaagtgggaaagatctcactgctttttgtgcacaaagcctgagctcagagggaactcttctgagtttgaaggggaatgataactcagtccatactttcagaagctgagcctcagtcaacaaataggaatgagaatcttggaacagattccagggcacagtgtatcagaaggctcttattctctcagcctgcatgtcttacctgtaaaatagggagaacattgcttcccaggcatattgtggggtcttgtaaatagaaattgaatctgaagaccctgtgcttattctctgcgttaataagaaacagcaaattcttcctaataatttatccttctaggtttttgattatcccttttcttcactgagaagctattaatgtttgctttgtagctctagtgcataacacacacacactcagacatgcttgcaaaatgtgcctgccagcgtcttcctggataaagggtggtgttggtcatttaggggagaaggagagagaagaaggtgaaaagagtcagaaccccagagaggcaagagaaaatagctagggtggcctctctctctcttttttttttttttttcctgatacagagtcttgctctgtcgcccaggctggagtgcagtggcgtgatctcagctcactgcaacctccacctcccaggttcaagtgattctcctgccttagcctcccgagtagctgggactacaggcacatgccaccatgcctggctaattttttatatttctagtggagacaggatttcgccatattggccaggccggtctcaaactcctgaccttgtggtccacctgcctgggtctcccaaaatgttgggattacaggcatgagccaccacgcccagtcagggtggtttttctttagatcatgtttcttcctcctgccccattctgtacatctgaagggagctgaggcttatacacagcatcccccacatgcaaactcatgtgcaccctccacccaccccaggatgctcagccagctggccaagcattacagctggaattcagatggcggtctctagccagtgctgggcacattctgccatcgccgtccctagacctcctgcccttccagtcttcgtttctctccaagacccaagcagtacagccagccttggcaaggcccacctcttatcactgcattgtgggaggagataaaatgagacttgtgtgttttaaagttgagcagaacaagatgtttttaaaatgctgtgttccctatgtgggaggccttctaatgatcagctggggacaatgcgtccagtcctcccacccctgggaggtcccggaaaggactgcagtgtgggatgggaggcacactcccagtgttggatgcctacctggtggccagctcagacagagctgggacagagctgtctctagcacctctggccatgagggtgtttggccattcccagcagtcattcggcgtagctcagtttatctctcctgccagagtcgcctccttattggacggagggtgaggagcactcatgatcactttgtggggagagtgggcagagtagggctgagtggaggtgaactccccctgccgcatggacgctccccgaggtggggtatgggcgccatccagagagaccagctgaggccgaaaggtagattcttagcatgaagagctgggcctctggagccgggctgtttggatcaccttttatcttatttttttgagacagagttttgctctgtcacccaggctggagtgcagtggtgcgatctcagctcactacaacctccacctcccaggttcaagcaattctcatgcctcagcctccccagtatctgggattacaggcacatgccactacgcccagataatttttgtattttcagtaaagacagggtttcaccatgttggccaggctggtctcggaaatcctgacctcaagtgatccacctgctgcagcctcccaaagtgctaggattacaggcttgagccaccacgcctggccccatttcttcactttgaaagagaacataccaccccttggtaaagctgttgaggtcaaacaagcaacctaagagaagtgctgacttggagcctggcacagagttggtgcactttagggacaggacccagtgctttcttccccagccatctccaggactcatgagctgggggtgcacttggggagacatcaatactagtatctcagtctctccatggtccacgcctcctgacccccagggacaggctctgggaatgcctcctggtcagaactggcctctgttctcccacctgcttgctgggcctctgctggtccaagctgcccagtgtcccctcgtatcgtccatcccgagcctcaccagggctgccaggcctcagctgctctgagcatgccctgaccccgtggtgccgatccttgcccatatgctccggccacccatgttctcgctcctcccactggacagcttggcagcccctggtcaagagggcaaggtctccctcctttcctgactgctgggccctttctgatgagagctactcttcctctcctctggggcccaggtatgggggtggggctgagcctgggccagggcagtttaatcctgtgatccaactggacaccgtgacacccctccaaccttcagtgtgtagggatgggatggttcatgcgaaatgcctgctgtcgcctgacgctcccacccatcccggaaccctggagggtgctgcatgcctcgccattgtagtagctgggtttataacgtgatcttaatccccattagggacactgctagaggctgcccctcagctccttcaggcacctcctggatgcccctgaaaatcagtagcattaaaatatttccatgaagtcacggactagggagaaaggggcctctttaagccacgtgtcagactgtgaatctcggctccagagcggccacacctccagcccttcctttatgctgagggttttagaaccagcgacagatgcctgagggcaggtgtaaggggcattaggagctctgaattgtctcttctttatcagcctccagcaccacccaaatggggggaaatcctttcttctgggacaggtgtgagcctgggtgcgcgcatagtgcaacccctggaattcccagccacgttacacgcttctaatgtcatttggctatcctaggactccaaatgtagctctcctcgatccacacacataagaagatttgtggatttaaattctttttgtgaggctatgaatatgaaaacatattcgcctccttctcatgtgaccctaatcctggttaatcgtgtttctctggggcacttctccacactgcctactctgagccactatttgtgcttcagcagaatcttttttttccccgacttccccagcaaaggaacaagcaggaggcactaaggtgcaaagaggaagatttgcaagcacatcgaagggttctcccaagctgctggcactgctgggctgtggggcaaatgggcaggcgccgatgcagaaaggagcagggaaacaggctccaaaggaaacggactttccaagtcatgctcatggagactgggccactctctagactcccacagggtgtcctgtgcacccctctccagtccagccacgatgtgccagttgcaatcactactgtctgctgctcacaagccagccgggctcccctttgccttcagtccccaagtccacgttcctcaggacttccacgatccagctccacccacagcagcccctctgaagggcgccctgttttctgtaacataccagcgtctccatcatcaccaccatgtgcttttttgggcacaggcctggtttaccctccccctctgccctcctccatcagtgctatgccccctgtctccatggccacctgccttacacagccttccctctccctttggttgtcattcacctgccacttgtggatcactaaggcccttggcatcatgtcttgggaggcactggttcctcctgagcagatttatgcgtgtgaactgccctgggctggatcctggagccggcctagtgtgcggcttcgctatctagcagtgaagatacgcatgccgccagctgtgttcttgaagcatcgcaggcatgcttgggtacctgggtgaggtacggcagtggagcatggaagagcaggctcaggaatcggccctcaccccttcctagccatgtgacctggagtaagccactgatacccaagggcctcagcatccccttctgtaaaatgggattatggtgtcacctccctcataggacctggaactgcactttagctagtccctaaaatactgcgtagtctctcaaagcccaacttccttctctgcccaaagagcaaatgcctgcccgaagagcccctggggactttcgccaggcatccacacacaagaaatgtattagctatggatgggtcaggcatgcacagataagttggggagggagtgagttggagagaaggaggggcggaccagaggccactagatctagttagagatattccatgggcttttgtctgcaggcttatcaaacaatgaggattctttgatatttaagcccggcaggagtcagagaacaacaggagaggacccagcagatcaaactccaagaggggcccaggagtgggcggtggtcaagccacaggcgctgattggagcagccatgggcgggctaaggggaccttgccctctggctctactggtgttgactacatttctatgggagggactgatgctgtcatcagggagcttgggggacaggcttcttggagtgtccccctggtgggacctggaatgtgttgaacttggctgagtggtgcaagggatcccctggtgccatccctgccaaagaccctatcagtgtcatgagcctgaggatgaaatctcccgatgggtgagtgccccagcagcagttggagcagagtttgggcagattctagcgagagcagctacccaaggtggaggggaggccagggctcagggcatccagctgacccacgtgcttcttgcaaatcctctgaggtggccagcgcctcagaggggtgtccggggaggggcgggaggcatggctttctgtggggcacagctcctggggcactcattgcttagaccacattgtcagctgtgccccttggagttaggtctgcggggtcacctggactggtcatggtgctggcaggacacaaatggtgcattcaaagtgggcagtggaggggagctgagttgaaaggtcattcacaaggtcatagtgtggtgtaggaaacagcaagtgtggtgcagtccctggggctggaaatggtgggactgtttccaaccctagggctgaagggacaagaggacatagacttactgagacccccaggacacagctaatgtgtggatggggtcatttgacaggagcaagggaccatcagcccttggctgtcccacagggagggcgccaaggcagtcactgcctgtccccagttccctctctccctctggccttcctccagggcttcctgtggctcccaggaggttgtccagactttaggggggccaccagaccttgcctggccccccccgtctgccagtgccgctgcagtcttccaatccacttgactttgttttctttcagttcgttggactcacctactgtccccacaggccttcatacctgtagcttcccctgcctgggaggctctcacactccctgcccaatcacctgtccaccctgtggaccctcagtcactaccacttcccccagacatcagccagtccctcttacgccctctgctcgtggcactgaaggctgccagtcagggctctccaggggagcagagcctatcccatatttgtgtatgcatattaagagattcaactttcggaactggttcaggcagttgtggaggctgccaggttcaaaacctggtgggcaggccagagggctgaaatctcaggcaggacttgacttctctgttacaatcttaaggcagaatttcttcttttccagggaacctcagtttttgcccttaaggccttcaacctattggatgaggcccacctgcattcatctcctttacttaaagttaactgattggagagcttaaccacatctgcatgctaccttccctgaaatacctagacgagtgtctgaccaaactactggactccatggcctagccaagctggctcattacatttatttatttacttagagataagtctcgctcccccaggctggagtatgatcatagctcattgcagccttgaattcctggactcaagtgatcctcctgcctcagcctccacatagctgggatgacaggggcaagccacatgcctgctgatacattaaatctaaccatcacagctggtcttttgtgtgattccttaataatctcagcctctgtcccaccctgtgatgttgctttcagtgagcaaggacgaagatcattctactttctctctccttttttttttttttcgacagagtctcgctctgttgcccaggctagaatgcagtggtgcaatctcggctcactgcaacctctgcctcccgggttcaagcaattctcctgcctcagcctcctgagtagctgggactacaggcatccgccaccacacccagctaatttttttgtatttttatagatagggtttcaccatgttgtctgggctggtcttgaactccttacctcaagttatccaccctccttagcctcccaaagtgctgggattacaggcatgagccaccacacccagccattctactttgtctaacctttgttttgttcagcacttgacagcaactgctagatggccggagcccagtgagtaattgtcaaatgaaagaatgaaagcaagagcgagaatccacaaaggggcttggcagtgtccaagtcagagatgttgccaagacaaagtgagatgctgtatgtaaagggtctgcatgtagtaggtgtgaaactcacacatgccatttcttcttcattttcaaccccactagccattatccacacacacacatatgcagttctgaatttctcagaggaatgatgatcctgggtaggtgacattttcctaatgttaatgttaatgttaaatattcttttgtgatggtcaggaattgttctaagcactatatatatatatatataccaatagtattgtttccaatatgtgttaaatattcaagattattagtaacatgattgtacggtgtggtagctcatgcctgtaatcccagcactttgggaggccaaggtgggcagatcacgaggtcaggagttcgagaccagcctggccaacatagtaaaaccccgtccctactaaaaatacaaaaatgaaccaggcatggtgcacatctgtagtcccagctactcgagaggctgaggcaggagaatcgcttgaatccgggaggcagaagttatggtgagccaagatgacaccactgcactccagcctgggcaacagagcgagactccgtctcaataaaaaagaagtaagaaagtgactctcaggactaaccaatagtcattaatttgttcaattagccaagtctaggtgagcaggggctgggatcattgttgcattttacagatgaggagctgactggcctcggcttctgaagtggcccaagtcacgctgtgctccgtggctgctgtccctggggttgggggtgggtgttctctcctctcctgggaggcgcagggagcctcagggcagcacagttgctggctggctggcttcattcgagactgatttttttaatcgacataaggagagaaatgtccaccccagtcctgccattgacagggagcttgtcatcacctgtttaccttgcagtggccaggacctcctctcaggcctcacctcactgtggccctgtttctcttggatgatgttttctggagggaaacgggtctggctcccctcacggctgatccttcctgacccaggggaggagagcggcgttgagtgggtccaggcctggctcggccatgagagcacagctgtcagcttcaggggtgactcagagcgggtggagcccagctggaaggagaaaacaaaacaagggaagggagggctcacactcgcccctgccaggccctgagctgcgccacacacaaagcccactcagtgctcacagtgccaccatggagtggggataggctggttcctcttccacagctcagacagcaaggaggcccagggcaggggccgacctcagcctggcaccatccacttcacaccagtaggtgtgaagttgggattctgcattggccgtaatcctgactttacacctaccggccgagggccttgggtaggtggcttgaccactgtgggcctctgtcccagctctgaaagctggagatgatacccagtaccttcatcgggagcttgttgtgggcccagccaatgtgcaccggtattgtgcttagaacacagtatagaaaagacaaaggtgatggtaggtgtcctcagtgttgacacattactgctctatgcagtcacctcaagtagggatggtttttaacccccgctttatggatgaggaacttgaggctcagcagcccatgtaacttcctgggggtcaccgcaaacagccccccaccccttgtggcagcagctaaaccaactcccgaccttctctcctccccaaagctccaccctctctctcttttcagttgcagcccatgacacctcctaagatcctgcccctgggaatgggaagaacacctactccggggtagccaccctgtagaatacagcaggttttttctaaggagtcaagcgggtcttgggacttgggcatctggttttctttagccctggtgcacttttcctgtgtatccttggaaaagtcacttcccgtttctgagctcagcttccacatctgtggactgaagtgaggcagcagcttgaagcgtgaggatttgattcggggatccaggtgcttatgaagttcttggaagggcagtgagaatgggggacctccagggtttgggctgcaatgcttcaggttgaggcccacaggccacgaagcttcaggaagtcagggcagaatctgcagctgccccactgcctggaggtagaagaaggcaggttctggagtccagattctggggcagctacacagcagcttctaccactgccagaggaaggaaggctcttgcctcgcccacctgcccgtcccagctatcactggtcagatctcaactatttccaaagcactatggacagggatgctgggaaatgtagttcccaggcttccagcccctgcagttaggggaagcacacagcgagtgggaacaaactctcactcctgtagacagtggccagcataggaacccctgctggcagcaagaaacagggtgccctgagaaccctcgaatgcaggcaggattgatgcaactctcaatatggtatttgagccatgtggattgcagataccactctagcttctagccttattcgttgatcatagctacaagtttgctgagttcttaaatgtttctgaacagtctcccatcacaattcccagtgcgtgatacccagggagcagggagggttaaggacatcagcaaagagaaggcctcatcacccagggtcagcggtatcaggccaggagtaccccttagcttcagggggatggacaggtggcaggaatcctggggcggggtgggctttttaaagcccagcaaggcttccaaccaggtgcctctagctctgactcacttggcccaggtttcttattaggctgattctccaaatgagggattaaagtggaggtcagacacactcccttgtaataacacaggggcacaagggactgcgctgggagagttccatgtggaagttccacacactcagcttccagagacagcatcttcttcctggggacccatgccgagcacagagtgtgtaggaaaggagggaaggaaggagggaggaaagaaacgtttagacattgatcccaaagatacaaaagacctggtccaagttggctctgccatctcctagttgttttaactcaatccaggtgcctgccctccctcagcctcagttttcttgtctgcaagttgacagtgaaggtaactcccgtgtattaagcatctgttaaatgtgaagcatttatgcacttaactctcatgtgaacctttgaagagatgtgattttccccatcttgctggtgcaggccctgagcctgatgaggtagacgaggtccctacccaagacctctcagctaggaggtcggaaatttaggaatcaaacccagatctggctgacccccaatacccatattctgttcaccacccagtgaatggggctgctgaaagggtcaaatggatggcagctgtgactgttttggcaaactataaaaaacaatgcaaaaaaagagatgacccccaattcaagactggcagtcggaggttgtgaggtggccaggctttcctgcggatgtgtaaatcttggatacttcagaagacaatgcatctgcgtttccaagtgtgtgggaaaaaagactgattggagagtggaaaattggagctaccagagcaattttgaggaaccttttcctggggaagatcaaagctggtggcaaactcaggtgggcctgactctctacataagcctctgggaccagctgcctcctgacccaaggcaaggctgttgcagagtctgggtctgggagcccctgggaaccctgacatttcccccagtgtgttaggagctccttcctgcaggtcctgggaggtcttggccacgggagtagaaagcatgaagatttagctgttcagcacatcaaggaattcacacaaataatgaattcggccagaatcatcatttgtgtaataccactggtttgcatgatttgatgcctgatttcatttggtcttttaaataaccctgcgagtaggacaggccaagggttctgctggactttttcctttttgtttacaaatgaggaccttgaagcttagtggggagagacagaattgacctttgtggtcatctactctgtggcgggaactgagctgttcacttttgtgcaaggccatttatcccacagcaacgcttcgtgtgagcatttttgtttgtttgtttgtttaagatggagtcttactttgtcggccaggcgggagtgcagtggtgcaatctcagctcactgcaacctccacctcccaggttcaagcgattctcctgcctcagcctcctaagtagctgggattacaggtgcctgccaccacacccggctaatttttgtatttttagtagacacagggtttcaccatgttggccaggctggtctcgaactcctgacctcgagtgatccgcccacctcagcctcccaaagtgctgggattacaggcgtgagccaccatgcccggcctgcgtgagcatttttaatcctattttgtagattcaggaattgaggatcagagagggcaagtgccttgcctatgaacacacagccaggaatgggaagagtcaggatttgcatgcaggtctctcatgcctttgttgttgttgttgttgttgttgttgacaactgttggccatgatccactaggaaattcttcacaaaaccagaataaatgggttccaagcgtccagtgaccaggcatgggccggacagcagttcagaaaggagtcattcttcttactggaaggtttgagggccattaagtatccaagatttactggtcaggtcttacttggtcccaccctgtgcccatacatgaagccagccggccaggatcccaaaggccaggacatgggaggatctgtttttcaataatgggaagtccccggatgtgttgcattggaagtcatctcactgtctgtgcagagctggcctgggagcaggaggttctgacataaagtgaaagcagatgcagtggggccgcttgggtggggcagggaggtggtggctgccatggctgcagctgcaactttccagcctgcaggtctgcctcttcctcccaccatctgtgcacttggctggtgtgaggaggtttgcctcggcacctctggggcctctctgggccccatcctcttctctgaatttgccacgcccgtgacacatacaggcaaccactccaagaacaggaacatggagaggcaaagaaaagatgctgtgacttctactttgggcaatggcagaagctcgtaccagatcttttctcccactgagaactataaaagctggaaaaacttgaaatccagctctttgaaggcattagagaacaactaaagcagccaggacttgaggtgcgaagaccccccaagagaaaggaaataagttgggagaaacccaatattccctgctcattttctgcacgaggtatgtgctgatttttgcagagggttcagaggacgagcagagagcagcagttcagagtgtttggcagtctcgcaaggtggggaaacaaaacagagataggtaggtaggtagagggagtcagtgagttcaggactgctaggtcaaccaaaacccaaggaaccaagaacctagagcaaaaacaaccacaaagaaaagaacatgtgctctgtgccttctaaaattttcctttcaaggcatttgccagcacttaagtttcatgggtccagagtctaagaaaccaagcagaaaacagcagatgaaaagctaaaaagactgggcatgtggctcatgcctataatcccagcactttgggaggccgaggtgggtggatcgcctgaggtcgagagttcgagaccagcctgaccaacatggagaaacctcgtctctactaaaaatacaaaaattagccaggcatggtggcatgtgcccatagtcccagctacttaggaggctgaggcaggagaatcacttgaacccaggaggtggaggtaatagtgagccaagatcaggccactgcactccagcctgggcgacagagtaagactctatctcaaaaccaaaaacacaacaacaacaatgacaacaacaaaaaaacccaaacaaacaaaaaagaaaggctaaaaagttaagcttacggtgatctcatagtacaggggagacagaaattggagataggagcctgtaaggaagagtcaccctgataagcatcttggtttacctgttgagaacggctatgccccaggggtaagagtaaaccagaaatagaccagtcttcatgaaaagtgaaacacagctgcagttagaacaaagtaatgtgccacttctgtacctgctcatcaggagacaaccggtcctctctgaaggaggacagcctcatccagagcctctgcatttttgtcatacacaatacaaacagcaaccaggcctgccaaggacagaaccaaataaccaaagaaagaaagagcaaccgagaaaatagacaatagaaatacacccacattatccaagtatcacaggatatccaatgtgggctttaagacggctgtggtgaataaaattgcacaaagatagatgacaaggtggagaaattcaccagcaaagtagaacctgtcaaaaaattaggtagaaattccagaactaaaagacaccactgaaatgaagaactgaattcataattcaaatagagtaggcacagcaagaagggggagtaaacaaggctggaaagatgacagtaaaccaagtccaaagaagttatcagaaagggaatggggaagatagggaagataagagcaggtattgatggaattgaatgatgagccacggctacacagaaagccacaggagaaggcaggagtctgcctttgctaccattttgctgtgtgaccttggataagtcacttgccttctctgggttttagtttttcatttcagggagacaagcgtaagggttacccacctctcctggtggcttggggatcacatgaggaaagttgtggccactctgtattgaaagcgtcaattttgccaacagcctgcacagttcgctcaggcatttctctagtgaccatagtgccaggggctgtgtgaagggctgggagggcatcccagcctgtgatgggtatttactaccatcccgttcagtgggtatttactacaggttcaaaaccccgtgtggttccttcatttgtgtttccaggagtttcacacagttctctcagtctctggtcattgcccctcaactccctattgccagaggagtttatcttcattagggactctccttagggaaattcttacttttcagtccccaaaagtgtgctgacatttgtcagtcttgtgctggtgaccccgctaagctctgttgtgtgcaggtgcttcatgcctcctcgtattgagcatgtggctgggaaatgactgccatttggcagaggacagggagccagcttccctccttccccatccttccctgctccctctcttctttctccttgttctggggggcccggcctccctcaccgcacacttgacatgcagagatctttggtctgtggcgtcctggcccagatgtcatttccgggagccagggctggcattcccccatgcctgcaggctgccccacgcttgctagagcacggagaagacatgcagtcctggtttcttccctgcagccagggaaggggtatagcggtgttcttgcttttccattgcagttttatccagggctttggaaagcgctaaatgataccagctcagaagcctctgatggttatggggagtgccctggccttggaggtgtggctgcaggatgccccagaggagaggaggctgtcacagtcccacaacctgtgcagcacaaccttgccctctgccctgcctctcacgccatccctagcagcagcctagagcattaatatctctcacgcagaggcaggacattgtaggaaacctgacctctcatccagagccttgtttgatcaacacggatcaacagtcatctgtttcagggaactcatctctgccctggcattaggggtgcagaggcactaagggcaagggtgtcctaggccctgctcattataaaggcaaatgtagtaagaccatggcattcctctgctcagccccaccagcaggtttctatgtcacccagagaaaacttagtcttgactgtggcttctctggcccaacacactctcaccccagctgcatgctcagattccccctcaccccccacccactcctctcctccacactgtgtctgatccagccatacaggcctcctttgctccacagggtctggggccctattgatgcctgggaggcgcctaccttagatccttttacgatgcaccccagccaccttgtccagggcctggagaacgcaaggaccagcaaatatgcagtcaatgaatgagatgaatggacaaccttgatgggctgacggccccgagaaatgagcagaatttgtgttatcaatccgtttttcccattgaagggatggttcggaagggctaggtgacttgttcatggtcacgcagtgagtagtgtgggacaggctgctgagaatggaaatgtgactcagagtctgtgctttctttctcagttctccctctggactgttggccgttttgtttcccttcattcatttctgggtttcttcatgacccaagcctccactgagcattgagtgtgtgcacgggtgacagggtcactgccatagtgaggctgagtttccatcctcacattgctcccagtccagggaggagacatatgtgtgaagagcacagacagagtgcagccaggaccctagggagccaggagaggcccctaactcaccccaggagagggcagggcttcctccaggagtcagcaccagctgagccctagagaatgagtaagagccatcggcaaagcagggtggggtggttttctggacagtggggacagcctgagcagggacacggaggtaggagcaactgtgacctctgggtcagtcacattgcttcaagttacaaataacctactttaccccataaaggggatttattccctcatgtaactgaaaagtcaaggtgagggtggggctgcaggttgagcaggatcagggatttagcaccatttgttcgggttgttcagctctagtctcttctacacacgctagcaaaatagccagcaggatgttccacatgtcaacaacaagccagccagagcaaaagaaagtttcttccctccctacagaagcttggctggatgaattaaggcacatgcccatccctggatcaattactggggtaagaggtgggaaccctctgccagtcaagtgaattgtgagcctatctgtgatgatgcagaagttattcttacttaaattacagagctgctccttgatgggggcaggtggggagagaattggatgggatacctgtggacaccactaggttataaacaaaatctaggttgtcatgaaaagtgaaaactggagcagagaccggataaaaatgacgttgccaactgagctgcagagctcagaccttgtcctccatacgttgggcttctagttctggaagctgtagagggttgcaccctatgcatcttgggccctggatgtcttcagaagggcactgtggatttaatatggttttggagctgtccccctttctaccaaaaggtgatcaatctcctttcaactctaattttcctggaaaaaaatataccctgcttattgacaatctacaccttgagaatggggaggaatcgatcagatttcttccattcttcagcattccaagcaaagaccaaaaagaccacgctccagggcagacgtgcaaccacagttgtaccatacagaaatcccaaggtgtcggtgagagccagaggggtctccgatgggcatttgagaggtacctgtttgccttcttcaaaagaatactccccccttgctctatatccctccagccgtagtaatctgaagaccagttaacaagacaggtgtctgctccagggtagagccccccaaccccctgttcctggtcccccaacccctcccgatgtaaggaatcagaggactgtggatttggactcggatcctgctccttcctttccttaggcaagtcatctaagcactttgagtctcagtttcttccaagacaaaaagggaaactaatatctagctgacagtatattctgaggattatctgaagagatacgtatgcatgaatatctcattctctcagctcttagtggatcatcagagaatattgattcattcacatgttgaagaagaaaaattaaagttcagcaatggcctaatagataccagaagcccagcatacatcattttatcttatcttcataaccattctataagtaggggtgttagtatcccactttgcagaagaagaaactgagggtcaggaaggtcaaataactttcccaaggctccacagctgggaaatcagaacttgaacctggaccatctaaagcccctttttatggaactgaggccaattggcagagcttgaatgcccaggtaaaaggaaccctgggccactctctaagcataccattgttgttgtgcttgttgctgaaatccaaaatctggaagagaatgaagtagagagaaaggcaaataacatgcatttaacaattcctgtgtatattgtacctacatgcatcacgagctctttgacaaatgtttgttgagtgtgtcaatgtgctaggttcttgttggaaacatggaggggacaccttctgcatcccataataaccttgcaaagagatgataacatccattgtatgcacgcactcaggctcacaaaggtagataaaccatccagagccacctgccaggttggcatgacaccagaaggaagaccacggaatacgtcctggtggagatgtggagagaaacattttttatagcaggatcacagaatctcacgctgttttcttcctccttttctttgcagatgacagacaaccttctgtgccttcatcaagctggttgtgtacccaccatgtccctggcgacaggatgggaaagaaaaagccctaattaaggatcgtcagaaaccacagttggaggaggacggcagagacagtttccctccccgctataccaacacccttccttcgaggtcctcgctcctgagggaccctggactgtcacagagattaatgaccccttatcttctttggatgtgaaaggaaatcactggttaaagcttgatcgagagacattatcagctctttaaggattgcaggagaataggctactttattttctgaaaaggtaaatatatgcaagcaaagccaacatgccacgaatggcgttggtctaccacacagccgtgtctgggacacagttgggggtcatcccccagcaggagtgaagtcgagcttagcggcccttgtgtcctcccttggaattcctgccatcccttttgattgagcctccacctctgggatttttcttccatttttctcctctcttaggagggagttcctgctacccatcgtgggaggccaccatcaggactgcgaagatggtgaccctgcggaagaggaccctgaaagtgctcaccttcctcgtgctcttcatcttcctcacctccttcttcctgaactactcccacaccatggtggccaccacctggttccccaagcagatggtcctggagctctccgagaacctgaagagactgatcaagcacaggccttgcacctgcacccactgcatcgggcagcgcaagctctcggcctggttcgatgagaggttcaaccagaccatgcagccgctgctgactgcccagaacgcgctcttggaggacgacacctaccgatggtggctggtgagatgctgcctgagagcggggtctgggctgagagttggggtgtggactgagagtggggtctgggctgagagtggggatctggataagagtgggaggcctgggctgaaagtgggagtctgggctgagggtaggggtctggtaatgagagtgaggtgctctcagagttaaatgctcagtccccgtgtacacctggggccctgccaggcagttagtaggattcagattattgtcccaccctatttattgaggatctattatatctaagtcagagcaggaagcacggctttagtttcctgtggctgccataacaaatttctgcacaattcatggctcaaaacaccaaaagtgcatcctctcgcagctctggaggccagaagtctgaaaacaaattatgggcagacttggctcctcctggaggctctgagggggaagccgccccaggcccgctcctggctcctgccagctgccggcagtgctgggcgttcctgggctcagagctgcagcagtccagcctctgcctccacttccacagggccttcctccctgtatccctttatgtctcacatgtccctctccttttcttatgaggacacctgtcatcaggtttagggcccaccctaatccaggatgatctcatgcagagatcctcaacaatttcacccacagaggcgctttttccaaatgtcatgctcacagattccggtgactagcacttgaacgtatctttttgggagccactatttcacccactacagctattgaaatgcaaaaagagagagagatccttattctcatggaattttattctggctgggaggggaagataagaaataaacaaggtaggctcacacagaagtgctttgaagacagatccaatgaggtttgtcatagaaacttagagggggcttctgtaaatggggtcaccagggaggtctctgagacagcaggactcaagttgagacccacaggcagagaaggcagcagccatgagaagagcaggaccatgcactgcaggtgtctgggacagcgggtgcaagagcccgagggtggcctctgctggatgtaatggggagtagaggagctctgcatggctggggggctgtaaatcaggggaggtgcagtgagacgaggcctgagagtcagcaagacccaggggaggactctgggatttcttgtaagtgcaacaggaaatcactgtagaatttttgtcagggggtttcatgatctgatcttgtcatttgaaaggtcattcccatgttaaatgcaaaatagatcgaagaagagcaagatatatgtgttcatgtcttatttattgagcacctactatatgccaagcatcactacattgagatggaaaagatagagtctttcctttcttgggttgcaggagtgatggggagagaagggaaaacagacaaactcaagccaggaccataggtgctgtgcaggaagtgggcacaggagcgatggtcttcatgtccaactccccttggagcctggggttatcgcagaaggcttcctacaggagtgatggccaggttcatcatgaaggattcagagaggttatccaggtagattctggggaaggtctatttgaaatgaacagaaaacatgtgtgagacttagaaaggtcaaaagccctgggctatgcttccaaagacctggctgagtcctggtttgctaatctgtgttgagcaccactgtgtgcaggtcctggggtgggctctggggaggtaacagagaaccgggcaggtagggtcttttccctttcaaagatccaagggtctagggaaggaggtggtgagccaggcatggtaaggattagggtctgctctcagcctcagcactatggacttgtggggcaggatcagccttagtcacaagggctgccccgtgcattgcaggatgtttagcagcatcactggtctctacctactgaatgctaggagtgccccatccccagttgcgatagccagaagatctccagacattgtcaggtgtcccaggtggggtgtgcgtgtgtgtgggtgcacatgcatgcacaaagttgccctcccttgagaaccagcagggttgggaaaatgacacattgatggcagaggtggcttcacacacatcccatctcctctctggatctgattccccctgtagcagcagttgctgggaccacgttaagtccaaacttcctcttcagagcctggagtctgtgatgttcagtgtcaccatgggattctgtttacaaaggccttttggggacaaacagggtactacacagcctgtttatataaaccaaacaggaagggaccttacacaacagcaggtaaaggagaaacttgggggcctttgtcctcattttacagacaaggaaactgaaactcagaaaagttaggtgacttttgcaaaagagaacatcaaatccaacctctggaaataccgtattaaaaactgttattagagagtatcaccaagacagtatcgatctttcttcttggggagggcggtttctaaaactcttaggctggtgtcgcccaggagggttaaaaaggcgtaagggaaaaacatcagcttctggatataagccatgtgtcttcaaagaacacaggctataatgtagacttaggaactgggcctggcatcagcgttcctaggttttgtcgcagagtttgtaggtcccatcaggagtgactttgaagaagctcttcatctcactgagtctcagcttccttcgtgttacatgggagaaatgttacttcaccaggttctctacaaccctgcaaacattagttttaacaattgtatttatttttgttggtttaatgggcaagtaatactgaacttaggtgggttttttttttttttcagtactaattaaggctgaatatatttccacttagttgtttcccatttaccagatgtcttcccctacctgcagcccttctctgcagtctttttctgaagtttagcctctggtggctgatcccagggcagccacttggaaggaatggggcttcaccctctggaaatcaacagaaaggagcagggctttagagctttggggttctaaaaaatgcacagataatacggaaaccacacgctttgaataaagaatcgggatacaggcatggaatatctgacaacaaagccatcctgagaactccaggctgcgccattgctctgcttaaaggcccccctgcaggcaggaccatttcatgaatggaactggacttgggtcatgatatggtttggctttcacccaaatctcatcttgaattgtagctcccacaattcccacgtgttgtgggagggacctggtgggagataattaatcatgggggcgatttcccccatactgttgagggggttggaagaatcttaggtgagaatgtgaggtcccgagctcccatcctgccctgagcttcatagtcctcctcagtcaagtgggcatcacaattccagctcgtcccagccctggcaggaacagggacacaggagcagtcaccagggctcactcttttagttgagttgagttgagttgagttaaattgagttgagttgagtttacaaatcagccccgtgccctgcaagtgaagagactgcaccaccatcccaggctggacctactgacccctgtgaccctctcctcgggtctctgtcccagacacccaggaacagggattccttcttccccagtccccatgtccaattcagagacaagccatgtcgaatgctgactctgccttctctacttgcccccaacttgggaaaccgttttgtgatacgcaggggacattctcaagggacagaaagagtgcgaccctcccctgatttccgccccctgccctcctaaggcatcttcccatcccagacatccatgcccagtgcccaaatgcaaaataataccatcatactgtccacccggcgcctagcaccaactctggccaggtcctgggcccagctttccaggtaccactgcttcgcccttaccacccccaccaccaggagggtgtaggtatctcattgtcctcactttgcacttaccaggtcacccactgtcaaagggcacagtcagatccccttgtagttaaaggacatggtctggagtcaggcccaggatattcaaactgttttggtcctgggaaactcacttcacctctgtaagcctcagtttcctcacctgtaaaataggtctataagatcacctttctcatagaaccattatagaaactcagtgagaagctgcctatcaggttatcagcacagggtcctgcatagggcaaccatagaacatgcgcttctgctcagggtgagccatctgagtcctgcacgagccatttctaagcaccgcctgtcccggcgctaacctgtccaccccacctgtccaccccacacggcaccggggatgtgataggggctcagttgtgatgagttgaatgaatgaatgtgtgttagctttagcagttgtcattcacttattcaatggacatatcttgagcctgtactacctagcatgcttgtgtctgctgcttggatgccaaaggggccagggaaaccaacagcagctggggattggaatgaggcctgcggtgaggccccagtggtgccacccatgtgtggaaggccagagactgatatttccagggtccaagggaggcttctcagaaggcgatgcatcattcattggccgtggaaggaggaaggaggatgggaagggagcgcgggtacctcttcccaacactctcgggacgggtgtggcctgtggatagggaggacttccagccatcgtgcctcaagacaggacaaactctgccatagcacaggctccagagttcctgtggatcatgcccgagtgcagggtgaggtgaggcacccagggctccagcttcaaggagatgtccgctctcgggccgtgcccctgggcatgagtgggcctccttatcccacttgcccgactcctcactcgcctcgcccccagcctgcagtgcttgactccatggagacctccccttccttctcctgccttgcttctcatccctctccagacagcacccaccatggacacctgcatccgtgccccagcctctgcttccagggaagctgacccgaggccccgtgcttcccaaggagctcaggccaccaggcggcaggcattgattgagcgctgattgtatgcagattgagcgctgattgtatatacttggaaactagtctggaaggctggagagggcgtgtccctgaacttccaaacactctgtcctgtgttcatatcagtagcactgtcatactttttttttttttggcatggagtttctctcttgttgcccaggctggagtgcaatggcgtgatctcggctcaccacaacctccgcctcctgggttcaagtgattctcctgcctcagcctcctgagtagctgggatttcaggcatgcaccatcacgcccagctgattttgtatttttagtagagaccgggtttctccatgttggtcaggctggtctcaaactcctgaccacaggtgacccacccgccttggcctcgcaaagtgttgggattacaggcgtgagccaccgcacctggccagcactgttgttcttttattgccactgacaaaaggcagagaaaaccagaatatttctttcccaaaacagtgacgccacatggagtaacctgcctgctccatctcagctggtgtggggaggacttactatgataatctagagaaagagccagtttcccatctgagctctacctggccctgcactcactctgtgacctcaagtgagccctttccagggtctgggcctccatttccccttttgccaatgaaagattggaatgggtctgagatttctgaagcgtggggcttgtgatgttaggtgaggcagggcactagagaaagtcgcatcacagagcccggaggtcatttctgccgtccctccttcccacctgtctctgcagtgctggggcttcagtttggcctggtgtcttactttgcaccttgtcagcgcttgtcagccttgttctaagggagaggagagtttgcctgggcaggcagcagggtagagctgcaaccgaatacagtagttttgttttcattgcattgtacaactaccattttacttctgccaggtaattcttgctttctacgtgtggtagagatgagaggtttcctttctaataagtttatttttattatttggccaggcatggtggctcacacctataatcccaacactttgggaggctgaggcgggttcatcacctgaggtcaggagttcgagaccagcctggccaacatggtgaaaccgtgtttctactaaaaatacaaaaattagccaggcacagtggtgcacacctgtaatcccagctgcttgggaggctaaggcaggagaatcccttgaacccaggaggtagaggttgcagtgagccgagatcgcaccactgcattccagcctgggcgatagagtgagactccatatcaaatcaaatcaaatcaatcaatcaatcaatcaatttatttttcttaaataagtcattaaagaaaagtaagtcagtcagagtccagcaggatgatgtggtgctgtgtgaagcaggcagcatactctccacacacgtccatggccgagcttgagtcctggcttctcaggcctctgtggcacccagtagacactcagtaaatgtcactgcatgatggatacacggtgccaggctcccaaatcaaagtagcggcgtgatggaaggccaccccctgggcctgggcacatctttacaagcctaaggggcacagcagcccttgctagttggagacctccatggaggttcaggggagtctggctgtggtcctctaccctggggctctcagagtgtagtccccccaccagccctggcagcagcatcacccaggagtctgttagaaatgcaggatttcggggccagctttaaacctactgagtaagatctgtgccttagcaagcctccagggggttttccgcacattcaggatcatggagccaccctggatgatcccatcagaatcaggcattttatctggatatcacatctgtgtgtgtgacaacatattcataatatttatcattttcaccacttgtgtgtgtacgattcagtagcattaaatatattcacagtgtgtgtaacaatcaccattatctataaccataactagcagatttttgtcatcccaagcaaaaactctgtccccattaaacagtaacttccccttacctcctcctcctcccagcccctgacagccacgctgccactctctgtctctatgaatttgactactctaggtacctcacataagtggaatcatataatatttttccttctatgtctggcttctttcattaatcataatattagtattttcaaggtccatccatgttgtaacctatttcaaaattttctttttatagctaaataatatcccatcatatgtctggaacgtactatgtttgtttattcatccatcgctggagactgggttgctcccaccttttatctattatgaataatgctgctttgaacatgggtataccaatatctgcttgagaccctgctttcaatttctgggggtatatacgtaggagtggagctggtaggccacatggctgttctgtttaaccttttgaaaaaccacccagtttttacctcggctgcacggttttacatccccaccagcaatgcacgagttccattttctccacatcctcaccgatacctgttgttttgcccttttacttatgataactgtagcagtgggtgtgaagtgtggtccagatcatgttgcttcccatgacgtgtctaacggtcttaagccagaggagaggctgcctgggtttaactggaagagcaatctggttctgcttgtgtgcctccccttggggcatccgattccttccattgcagtggggactgggtgccccgggatctccctacatatgcccaggtcactcatcttctggacagtggccaaagccactgctggccactccttcctctcccagccaccccttgcccctggggcccggagtagccgatgggaatcaccccacagcttatcacccctaccccaaaatccagggtctgggctttccaaaggccaagattccaagagccagagttagggttgtgtggtgggagaaacctgctggtgggtttctagaagcctgggttcaaatcctggtttgtatttgggatgagttgcttacctctctggcctcagagcatcctacctcacccacagtgaaatgacacagcactgtggcatggggacaaggtcagatgcaacacttttatgaaatctctccagggtttaccacgagtgaggaaggctgaggcaccaacaggcatcactacatagtgtggccagagctccacctgaggtgacgggcgggcctgggcatgcagcgggggccaatagtgaaaccaccgggggccaatagggataccaactcatcctggttttagcactgagagtcctgcatctagggaaaccccttaacctgggcaaataagtaatatttagtcaccctggaataagactggcattcaatctgcgagcagctgaccctcgagctaggtcttttttttttttttttcgagttggagtctcgctctgtcacccaggctgaagtgcagtggcactgtcttggctcactgcaacctccgccttccgggttcaagagattctcccacttcagcctcccaagtagctgggactacaggtgggcaccaccatgcccggcttttttgtatttttaatagagatggggtttcaccatattggccaggctggtctcaaactcctgacttcgtgatccacctgcctcggtctcccaaagtgctgggattacaggtgtgagccaccgcacctggcccaggctaggtcttaaaagatgaaaacaatttgctaggcagatcgcagaagccttgtgcatccagcaaactgctgattcttcaatctggctggagcccagcagtgctggggccgggggaactgagggtcaggcaggaaagatggcagatgtccctactgctctgtcccccatccctggccggggctggagaactggcatttccacctactcctcgctcttcttgttaaggcttgagcgggagcacgcaacccctgggccctggtgtctgagcagggtgggagtaagacacagctagaaggcttctgctatttttctctctttcaagtggtgacacgtagggggatggagggcctttcagagagacaggagcccccagggaggagcaggttggagaaacgctgatcacatgtggagtgggaggggcctgtgagtccaggtgtggctggatcacccaagcggcttcagcagtgcctggcacatggtaggtgctcagtaaacacttgcagaatacatgaatgctctctttacttcctgagtaacccttagtctccttgaaggaggaagtggaggtgtctgtgtgtgagccgcctccatctccgggggcccagcagagagaagggtgaacaggagggccccagtaaacgacagcaggtagctcaggggctctgctgccaggaggctggagccacaaagccaggttgaccaccttctgtcctccgcccacagaggctccagcgggagaagaagcccaataacttgaatgacaccatcaaggagctgttcagagtggtgcctgggaatgtggaccctatgctggagaagaggtcggtgggctgccggcgctgcgccgttgtgggcaactcgggcaacctgagggagtcttcttatgggcctgagatagacagtcacgactttgtcctcaggtgagtgccagaccctctcccaagcctaccgtgctgcacccaggggccccttggagctgtaggaagcatcttggctcaggctcaggaaggcaaggttcagtcctgggactgaacttacccagggaccccaggctccacactgcaccccctgggcctcagcttccccatctctgcatcattgcaggattggaatggactagaagggcctctgcgtgcagagaggaagccatacacgggaggtcccccgttgttgggagcttggcacatggaggcctggggagagggcaaaattaatgtgaggactcttatctttaaaattcatccccattttgtaatctaggccataataaaaccacatattttatgtaaaatatattttcccctgtcgccaagtgaaacagacatttcaggaagatgccccaagtctgtcctgggtctcctgccattcccactataccactcacaagtgttccacgctgagaagtgcaggggtgggggctggccatccccagcagccttctagaatagtctctcctgtctgtgattcctgactttagtccttagaccacttacctgcctctcagagcctcagtgtaccaggtgtcccatgggtacatccatggtaaggatcagagtcaggtttccttgactgcaaaaaaagggctgtggaaatatcctttggatgagattgtctgtgacaggcgggcagtggtggtgatggctagactcccttgaggtcatgaaagagagaaaaatagcagaagccttccagctatgtcttcattgtctctattttacagatgaggagaaggaggcccggggaaggcaggtgacacccctgaagtcacactggaggctcactctctcggagctctcaggctgtctgagaacgggtgcccgtgctacaagactcagctttctccccttctctcccaggatgaacaaggcgcccacggcagggtttgaagctgatgttgggaccaagaccacccaccatctggtgtaccctgagagcttccgggagctgggagataatgtcagcatgatcctggtgcccttcaagaccatcgacttggagtgggtggtgagcgccatcaccacgggcaccatttcccagtgagtccctcctgtggccccgcctcgctgctctgccccttgcagtggcaccctgtccccccaccctgccgtggtcctgctgtgcctccaccggggtgcctcccctcccccagcctcctccggcacacacaagcccagttcccgtggccgcctccccgactactccaactcttctctccctatcacttaacaaaccacaagctttagtgtcctcttgctaacaattcctgaagggacctccacgcgccctggagactctatgggaaggggccgccactagaaagggtcagcccatgtgagttcagcctccctttatttctgaagtgcagcctgacaaataacaacaccttatttttcaaacttatgtgagcgtggcagggtgagggttcctaagaaatgaggagtggggagtgcaggtgcagcctgggcccctccccagggcaagcagtgctgagcaacgcggctgtggcttccctgacaatcaggagcttagtttcctgagcagacaccgcacgtggcactcggcacatattatctcaatgaatcctcacaatagccattatcattagctcctcccagtgaggactctggagctcggccaagcaccttgcctagggttgaactcgacacagagcctgtgctgtcatctgacccttactgaagggaagtgttttgatgtccaggtttccacaagctgtctgtcttctgccaggttttctaggaacagagctagcccccggatgtgggtgcaggagactgtggagctgtgccctcaggagaccgggagtgagggaggcagaccggggcggggtggggtggggtgggacccaggtccagaagtggctcagctgcagtctctctgggagcaggaatcacacccgtgggaccagctttggcacctttgcactcagggtgcatgcaaccgcccaggtgagaaaggggcagccgcgggcctcaccagccagtgccccagcagctgggcaaaggtgctctggccctgagaggtggaggcaccacggccccactccactccttaaggctgtgcttggagcaagtcctcctcacctttttggggaatggggccaaaacccagcagaatgtcctcaaattaggaaaggccgtcctctggtgtctattggggcttgctgtgggcagaaacccggctggggtagggaggtgggggtccctgagggaagctatggggggcaggagaggctatgcctgcttcattatctagccactacccccagagctgcatgcccaggttcctgggcctgtcccctgccccattaaccagcttctctttctccaactgcagcacctacatcccggttcctgcaaagatcagagtgaaacaggataaggtgagtggaggccccggcccctctgttctaagttcaggcttcctcatctaaggctctgctctaaggtacggcattgagttgcaagacagcccccagatccccaggccgctggaggtagcatctcccacttagctatccccctgggggaagaggtcaaacactgggagagattctcaaagtggggtcccccgggccagcagcatcacccgggagtttgtcacagatggacatcctcaggcccatctcgaacctactgaatcagaaaccctggctgccccgcattctggttttaacacattctccggggacccctgtgcttgctgcggtttgtgaattactctcaaagccaggctgcacctcctgcttctccatctctttccatgtctccatcttccccagcaggcccctggcatggggctggccaagagatgggcaaagggcagaagaaggagggaagtgaggtacccaccacactggccttttgcatactctatcaaacttagataggctcggagaggtcaggaaacttgcccagagacacacagctagttctggataaggctagaattgaagactccccgtgcctccagcatcttgccctttgcattgggttgtgctgcctcagggaagaagccacttatgtgtctctatagggtggggttggtggaagggacagcctcctagagatggtaggaggccacactgagaggtgaatggtttaccagagacccacagaatccacccttccagtccattcctaggggctggagtttggctttctggacgtgcacgccctctcctgcctgagaattccctttcgttgtgctcaaggcaggctttgggtggtggaatcaaggccaggcctgatatcggcctcctcccagctcagccactgctggctgtgtgacattgggcagatcacttagcctctctgggcttcagttttcttatctgcagcatgaggagagggaaacctgggacatgaggtcattttaaggattggcgatgattccagccatcatcaggtggcttggtgcatatgtcttcactcactgacagtgtccagtcccacctcacactgttccctggagcccccttctcctgagcagcctcccatctcactccctggcctccttggatttttctgtgtgtcagctcagtgatcctcctcacacggtcctgtagggccctcctctgcatcattgctctccatagcacttattagctcagcacctctgtctcttagtgatgtggatgagtgtccatctttcctacgagcatggaagcccacaagtgcaggcgtatctattaggctcatggctgtgcctccatggccacaacagtatgtacatctgacaggcgctccatgtcctttgccccccagaactcactaagggccgtgtcttcccatccccgcagatcctgatctaccacccagccttcatcaagtatgtctttgacaactggctgcaagggcacgggcgatacccatctaccggcatcctctcggtcatcttctcaatgcatgtctgcgatgaggtatgccaccctccccctgcccacagggctgcctcgaagctcaccgtcctgtgttcccaagagaggccagggagggggagggcaggtagacctagcctgcctcttccggaagctcggattccctgtctctacgacaggacttgcaacatgtgtctcccagggtgttttagtgagtaacagtgctctatgagaaagttctcgggagcaatagttctggcacattctgtgtaagtgcccaggaccgtggtggtggaagctcggatctcgcagcagattccggatacagaagcggattctcatagcgagagttgtctaaggccacagttctcaatcccacttgctccttagaatcatctgtgggtctaagttccagcacccaagccacaccttggcccaattttaccagaattaatgggagccaggtacccaggggttccactgtctaccgaggttgagaacccgtgatctcgagaagcatgcatttgccttcccatgtccttcgctgtccgctaggctgtgttcgggtttccacttatgctctgagaggtttgctgccaccccaggaagaggggcaggagggcaggccacacagcccccacttcctccctgatgttgggttcaggcagggccctcacgtgtcccttcttgtctcattcagcccagccccagccccaccctgcctggtgcctggtgggaatctcagaaagggtcagaggcattgcaaggcaggtccccaggctcagccccaccctggtgttcccaggtagaaacatgggtgcccctgtcatttccccaccccacccacctccagccagctggtcccagacccttgcttgaggttctgctcaagagccctttctcccatcgtcccaccgatttggccctaacgttcttgccctggagcaggcccatgtccatgttgcatttcctgagaaagccacatgtggcatggtgctgtccccgtcccctctttgtccccacccctccaatctatcttccacgctgcagcccagatagcacgtcctctccctggaagcccctccatgcaattccttctggtcatcttgtactcattttccaagacccaactcacatgccacctcctctgaagagcttcctctgacctctcagggcatagctcctccctcctctgtgctgcgggagccctgaatttagccccatttccaacaaggaccactcagtcagtgactccaagaagctataagctccaaggctgcttccccctgcagctgcccagctggcatctgatcaagctctgcctgaacttcagtacagccagcagggtgctgggctcagaataaatgcacagggtttgtcatgtatgtgaaaggcctggtctagtggccctgagggcgcctggaccagatgaatgttggccacagagaagaaagggatcagccctgccctctgcctcactgcaatcatgattcttggacccattttccagatgaggaaagtgaggctcaaagaagtgacttcacatgcccagggcaccacggagtggcagagctgggatttggggcagtttgcttggccccaaagccctgctctccttccactctcttccattccacgccctccttcctattccttccctctgtagctcctcaatcctgggagaataggttgcacttgctgcagaggtaagacccgggcccctgagaccacccagatgcagtaatctctcagggtgcttctggaattagacttgagttttacttaacttgcatttgcttcaccaagactctgagagttccaggaacgtagagaagggtttttaatgaagggttagtcagagtccttggaaatgctgtttatggtcctgtgggattccaggaacgcctacaggcttcctttctcagaggtgccaccagcagccctgctgtctggttctcatctttgctttgctcccacaggtggacttgtacggcttcggggcagacagcaaagggaactggcaccactactgggagaacaacccatccgcgggggcttttcgcaagacgggggtgcacgatgcagactttgagtctaacgtgacggccaccttggcctccatcaataaaatccggatcttcaaggggagatgacgcagtgaagggctgaggatggacgcactgtcacacctctgcatttccagccccagcatcttgctggagccgttccatcccggagcttggaggggcagcctcaggtgtgtgcctgggcaccgctcacagcctcttgcacccagccgttggcagcatctactcagcaaggtcactaagctctgccagcgtggcagagcatgtcttggaacctgtcttgagtggggacaacgtccccccactgctgccctagagctggggagacgctgggaaaggttcaacctccacacactaaaatcattttggctcctggggcaagcttggggaatgaatgtggaagatgcctatattctgagagacaggacagtttcccaggaagatgggcagagacttgagtggcgattacctccagcacagagacgtgccaggcggtgttggcgctcggggcgagatgctgcccttctttgcacgaagcctggcctcttgcttggcgtgataaccctgtcatcttcccaaagctcatttatgagccaccagaggctcctaccccaaagattttcacagaaacttgaggccaggtgccgtggctcacacctgtaatctgaacactttgggaggccgaggcgggaggatcacttgagcccaggagttcaagaccagcctgggcaacatagtgagactcctgtctctacaaaaataaaagatttaaaaaaattagccaggcacggtggcacacacttgtagccccagctactagggaggctgaggagggaggatctcttgtgcctaggagttcgaggctgcagtgggctgtgatcacaccactgcactccagcctgggcaacagagtgagaccctgtctctga

SEQ ID NO: 131 - DNA, 3388 bp, Homo sapiens
cccgggggaaggtgttcccgagccctctcccaccctcatcccgcctcctcgcttcctcggctccagcctccgccggcggagcccactatgccagacagtttcgacactttgcaaagacaaagagccctagaccggagggaggaggaggaggaagaagagcggagagagaaggaagaggcgatgtgagctgggaagggggcaagtgtccgggacacccacacccctgtattctcctccgaaccccttcatgcccaaatcccggaaactccagcgtgtctccagccgtggtgagtgcgcgcgcggaggcgaaccctgctcggggtgcgcgggggctgcgtccgcctgagttggggctcgggcagtttcctgtggattctcggagtggaaggttgattgtctggacccgggaactgaaggggtggggaggggactaggagggtgtgacagtggagctgggactgaagaccccgggattctagtggaagacattcgaagggagaccccttccttggcagcggcgaccacccagggctttgggagaggaagaaggtcggggtggaggttcgggcttaggggtcttcggccgacactggaggagctgcctggagctctgtggggaacctacgccaagtcccgggcagcggttcccgaaagcagccccagtgacattgcacccggcgccgggctgggatctcctccgctggggccgcccgtgggaggagacctcgctgggtggccgggctcaggcgctctcgagcggatttggggtcacaggctgggacaccgcggaggccgccagtgttctggacgagcggccgtgggacagtatccggatcgagtcccccaatccgctgcaagcaggcgcagatccgggaggtggctatcggccccggggacgccgtcagagcgcgctgctccggatctgggggtgaagttgacacccgggacaagagagctgaacgcggcgtggcggacattggtaccattttcagatttcatcttcctaaactggaaatgtcaatgagaggaaattaacacccccaagagctgcagtgagcaaatgcattgagcttgggtcaggacaattccatttggggaccagagatggacggtcactcagcctatggagatgacagacaaccttctgtgccttcatcaagctggttgtgtacccaccatgtccctggcgacaggatgggaaagaaaaagccctaattaaggatcgtcagaaaccacagttggaggaggacggcagagacagtttccctccccgctataccaacacccttccttcgaggtcctcgctcctgagggaccctggactgtcacagagattaatgaccccttatcttctttggatgtgaaaggaaatcactggttaaagcttgatcgagagacattatcagctctttaaggattgcaggagaataggctactttattttctgaaaaggagggagttcctgctacccatcgtgggaggccaccatcaggactgcgaagatggtgaccctgcggaagaggaccctgaaagtgctcaccttcctcgtgctcttcatcttcctcacctccttcttcctgaactactcccacaccatggtggccaccacctggttccccaagcagatggtcctggagctctccgagaacctgaagagactgatcaagcacaggccttgcacctgcacccactgcatcgggcagcgcaagctctcggcctggttcgatgagaggttcaaccagaccatgcagccgctgctgactgcccagaacgcgctcttggaggacgacacctaccgatggtggctgaggctccagcgggagaagaagcccaataacttgaatgacaccatcaaggagctgttcagagtggtgcctgggaatgtggaccctatgctggagaagaggtcggtgggctgccggcgctgcgccgttgtgggcaactcgggcaacctgagggagtcttcttatgggcctgagatagacagtcacgactttgtcctcaggatgaacaaggcgcccacggcagggtttgaagctgatgttgggaccaagaccacccaccatctggtgtaccctgagagcttccgggagctgggagataatgtcagcatgatcctggtgcccttcaagaccatcgacttggagtgggtggtgagcgccatcaccacgggcaccatttcccacacctacatcccggttcctgcaaagatcagagtgaaacaggataagatcctgatctaccacccagccttcatcaagtatgtctttgacaactggctgcaagggcacgggcgatacccatctaccggcatcctctcggtcatcttctcaatgcatgtctgcgatgaggtggacttgtacggcttcggggcagacagcaaagggaactggcaccactactgggagaacaacccatccgcgggggcttttcgcaagacgggggtgcacgatgcagactttgagtctaacgtgacggccaccttggcctccatcaataaaatccggatcttcaaggggagatgacgcagtgaagggctgaggatggacgcactgtcacacctctgcatttccagccccagcatcttgctggagccgttccatcccggagcttggaggggcagcctcaggtgtgtgcctgggcaccgctcacagcctcttgcacccagccgttggcagcatctactcagcaaggtcactaagctctgccagcgtggcagagcatgtcttggaacctgtcttgagtggggacaacgtccccccactgctgccctagagctggggagacgctgggaaaggttcaacctccacacactaaaatcattttggctcctggggcaagcttggggaatgaatgtggaagatgcctatattctgagagacaggacagtttcccaggaagatgggcagagacttgagtggcgattacctccagcacagagacgtgccaggcggtgttggcgctcggggcgagatgctgcccttctttgcacgaagcctggcctcttgcttggcgtgataaccctgtcatcttcccaaagctcatttatgagccaccagaggctcctaccccaaagattttcacagaaacttgaggccaggtgccgtggctcacacctgtaatctgaacactttgggaggccgaggcgggaggatcacttgagcccaggagttcaagaccagcctgggcaacatagtgagactcctgtctctacaaaaataaaagatttaaaaaaattagccaggcacggtggcacacacttgtagccccagctactagggaggctgaggagggaggatctcttgtgcctaggagttcgaggctgcagtgggctgtgatcacaccactgcactccagcctgggcaacagagtgagaccctgtctctga

SEQ ID NO: 132 - protein, 338 aa, Homo sapiens
MVTLRKRTLKVLTFLVLFIFLTSFFLNYSHTMVATTWFPKQMVLELSENLKRLIKHRPCTCTHCIGQRKLSAWFDERFNQTMQPLLTAQNALLEDDYWWLRLQREKKPNNLNDTIKELFRVVPGNVDPMLEKRSVGCRRCAVVGNSGNLRESSYGPEIDSHDFVLRMNKAPTAGFEADVGTKTTHHLVYPESFRELGDNVSMILVPFKTIDLEWVVSAITTGTISHTYIPVPAKIRVKQDKILIYHPAFIKYVFDNWLQGHGRYPSTGILSVIFSMHVCDEVDLYGFGADSKGNWHHYWENNPSAGAFRKTGVHDADFESNVTATLASINKIRIFKGR

SEQ ID NO: 133 - DNA, 2517 bp, Homo sapiens
atgaagaaactgaggttcagagaggttaagagactccactgaggtcacacagccgatgacagacaaccttctgtgccttcatcaagctggttgtgtacccaccatgtccctggcgacaggatgggaaagaaaaagccctaattaaggatcgtcagaaaccacagttggaggaggacggcagagacagtttccctccccgctataccaacacccttccttcgaggtcctcgctcctgagggaccctggactgtcacagagattaatgaccccttatcttctttggatgtgaaaggaaatcactggttaaagcttgatcgagagacattatcagctctttaaggattgcaggagaataggctactttattttctgaaaaggtaaatatatgcaagcaaagccaacatgccacgaatggcgttggtctaccacacagccgtgtctgggacacagttgggggtcatcccccagcaggagtgaagtcgagcttagcggcccttgtgtcctcccttggaattcctgccatcccttttgattgagcctccacctctgggatttttcttccatttttctcctctcttaggagggagttcctgctacccatcgtgggaggccaccatcaggactgcgaagatggtgaccctgcggaagaggaccctgaaagtgctcaccttcctcgtgctcttcatcttcctcacctccttcttcctgaactactcccacaccatggtggccaccacctggttccccaagcagatggtcctggagctctccgagaacctgaagagactgatcaagcacaggccttgcacctgcacccactgcatcgggcagcgcaagctctcggcctggttcgatgagaggttcaaccagaccatgcagccgctgctgactgcccagaacgcgctcttggaggacgacacctaccgatggtggctgaggctccagcgggagaagaagcccaataacttgaatgacaccatcaaggagctgttcagagtggtgcctgggaatgtggaccctatgctggagaagaggtcggtgggctgccggcgctgcgccgttgtgggcaactcgggcaacctgagggagtcttcttatgggcctgagatagacagtcacgactttgtcctcaggatgaacaaggcgcccacggcagggtttgaagctgatgttgggaccaagaccacccaccatctggtgtaccctgagagcttccgggagctgggagataatgtcagcatgatcctggtgcccttcaagaccatcgacttggagtgggtggtgagcgccatcaccacgggcaccatttcccacacctacatcccggttcctgcaaagatcagagtgaaacaggataagatcctgatctaccacccagccttcatcaagtatgtctttgacaactggctgcaagggcacgggcgatacccatctaccggcatcctctcggtcatcttctcaatgcatgtctgcgatgaggtggacttgtacggcttcggggcagacagcaaagggaactggcaccactactgggagaacaacccatccgcgggggcttttcgcaagacgggggtgcacgatgcagactttgagtctaacgtgacggccaccttggcctccatcaataaaatccggatcttcaaggggagatgacgcagtgaagggctgaggatggacgcactgtcacacctctgcatttccagccccagcatcttgctggagccgttccatcccggagcttggaggggcagcctcaggtgtgtgcctgggcaccgctcacagcctcttgcacccagccgttggcagcatctactcagcaaggtcactaagctctgccagcgtggcagagcatgtcttggaacctgtcttgagtggggacaacgtccccccactgctgccctagagctggggagacgctgggaaaggttcaacctccacacactaaaatcattttggctcctggggcaagcttggggaatgaatgtggaagatgcctatattctgagagacaggacagtttcccaggaagatgggcagagacttgagtggcgattacctccagcacagagacgtgccaggcggtgttggcgctcggggcgagatgctgcccttctttgcacgaagcctggcctcttgcttggcgtgataaccctgtcatcttcccaaagctcatttatgagccaccagaggctcctaccccaaagattttcacagaaacttgaggccaggtgccgtggctcacacctgtaatctgaacactttgggaggccgaggcgggaggatcacttgagcccaggagttcaagaccagcctgggcaacatagtgagactcctgtctctacaaaaataaaagatttaaaaaaattagccaggcacggtggcacacacttgtagccccagctactagggaggctgaggagggaggatctcttgtgcctaggagttcgaggctgcagtgggctgtgatcacaccactgcactccagcctgggcaacagagtgagaccctgtctctga

SEQ ID NO: 134 - protein, 338 aa, Homo sapiens; identical to SEQ ID NO: 132

SEQ ID NO: 135 - DNA, 3591 bp, Homo sapiens
cccgggggaaggtgttcccgagccctctcccaccctcatcccgcctcctcgcttcctcggctccagcctccgccggcggagcccactatgccagacagtttcgacactttgcaaagacaaagagccctagaccggagggaggaggaggaggaagaagagcggagagagaaggaagaggcgatgtgagctgggaagggggcaagtgtccgggacacccacacccctgtattctcctccgaaccccttcatgcccaaatcccggaaactccagcgtgtctccagccgtggtgagtgcgcgcgcggaggcgaaccctgctcggggtgcgcgggggctgcgtccgcctgagttggggctcgggcagtttcctgtggattctcggagtggaaggttgattgtctggacccgggaactgaaggggtggggaggggactaggagggtgtgacagtggagctgggactgaagaccccgggattctagtggaagacattcgaagggagaccccttccttggcagcggcgaccacccagggctttgggagaggaagaaggtcggggtggaggttcgggcttaggggtcttcggccgacactggaggagctgcctggagctctgtggggaacctacgccaagtcccgggcagcggttcccgaaagcagccccagtgacattgcacccggcgccgggctgggatctcctccgctggggccgcccgtgggaggagacctcgctgggtggccgggctcaggcgctctcgagcggatttggggtcacaggctgggacaccgcggaggccgccagtgttctggacgagcggccgtgggacagtatccggatcgagtcccccaatccgctgcaagcaggcgcagatccgggaggtggctatcggccccggggacgccgtcagagcgcgctgctccggatctgggggtgaagttgacacccgggacaagagagctgaacgcggcgtggcggacattggtaccattttcagatttcatcttcctaaactggaaatgtcaatgagaggaaattaacacccccaagagctgcagtgagcaaatgcattgagcttgggtcaggacaattccatttggggaccagagatggacggtcactcagcctatggagatgacagacaaccttctgtgccttcatcaagctggttgtgtacccaccatgtccctggcgacaggatgggaaagaaaaagccctaattaaggatcgtcagaaaccacagttggaggaggacggcagagacagtttccctccccgctataccaacacccttccttcgaggtcctcgctcctgagggaccctggactgtcacagagattaatgaccccttatcttctttggatgtgaaaggaaatcactggttaaagcttgatcgagagacattatcagctctttaaggattgcaggagaataggctactttattttctgaaaaggtaaatatatgcaagcaaagccaacatgccacgaatggcgttggtctaccacacagccgtgtctgggacacagttgggggtcatcccccagcaggagtgaagtcgagcttagcggcccttgtgtcctcccttggaattcctgccatcccttttgattgagcctccacctctgggatttttcttccatttttctcctctcttaggagggagttcctgctacccatcgtgggaggccaccatcaggactgcgaagatggtgaccctgcggaagaggaccctgaaagtgctcaccttcctcgtgctcttcatcttcctcacctccttcttcctgaactactcccacaccatggtggccaccacctggttccccaagcagatggtcctggagctctccgagaacctgaagagactgatcaagcacaggccttgcacctgcacccactgcatcgggcagcgcaagctctcggcctggttcgatgagaggttcaaccagaccatgcagccgctgctgactgcccagaacgcgctcttggaggacgacacctaccgatggtggctgaggctccagcgggagaagaagcccaataacttgaatgacaccatcaaggagctgttcagagtggtgcctgggaatgtggaccctatgctggagaagaggtcggtgggctgccggcgctgcgccgttgtgggcaactcgggcaacctgagggagtcttcttatgggcctgagatagacagtcacgactttgtcctcaggatgaacaaggcgcccacggcagggtttgaagctgatgttgggaccaagaccacccaccatctggtgtaccctgagagcttccgggagctgggagataatgtcagcatgatcctggtgcccttcaagaccatcgacttggagtgggtggtgagcgccatcaccacgggcaccatttcccacacctacatcccggttcctgcaaagatcagagtgaaacaggataagatcctgatctaccacccagccttcatcaagtatgtctttgacaactggctgcaagggcacgggcgatacccatctaccggcatcctctcggtcatcttctcaatgcatgtctgcgatgaggtggacttgtacggcttcggggcagacagcaaagggaactggcaccactactgggagaacaacccatccgcgggggcttttcgcaagacgggggtgcacgatgcagactttgagtctaacgtgacggccaccttggcctccatcaataaaatccggatcttcaaggggagatgacgcagtgaagggctgaggatggacgcactgtcacacctctgcatttccagccccagcatcttgctggagccgttccatcccggagcttggaggggcagcctcaggtgtgtgcctgggcaccgctcacagcctcttgcacccagccgttggcagcatctactcagcaaggtcactaagctctgccagcgtggcagagcatgtcttggaacctgtcttgagtggggacaacgtccccccactgctgccctagagctggggagacgctgggaaaggttcaacctccacacactaaaatcattttggctcctggggcaagcttggggaatgaatgtggaagatgcctatattctgagagacaggacagtttcccaggaagatgggcagagacttgagtggcgattacctccagcacagagacgtgccaggcggtgttggcgctcggggcgagatgctgcccttctttgcacgaagcctggcctcttgcttggcgtgataaccctgtcatcttcccaaagctcatttatgagccaccagaggctcctaccccaaagattttcacagaaacttgaggccaggtgccgtggctcacacctgtaatctgaacactttgggaggccgaggcgggaggatcacttgagcccaggagttcaagaccagcctgggcaacatagtgagactcctgtctctacaaaaataaaagatttaaaaaaattagccaggcacggtggcacacacttgtagccccagctactagggaggctgaggagggaggatctcttgtgcctaggagttcgaggctgcagtgggctgtgatcacaccactgcactccagcctgggcaacagagtgagaccctgtctctga

SEQ ID NO: 136 - protein, 338 aa, Homo sapiens; identical to SEQ ID NO: 132

SEQ ID NO: 137 - DNA, 2728 bp, Homo sapiens
cgatgtgagctgggaagggggcaagtgtccgggacacccacacccctgtattctcctccgaaccccttcatgcccaaatcccggaaactccagcgtgtctccagccgtggaaattaacacccccaagagctgcagtgagcaaatgcattgagcttgggtcaggacaattccatttggggaccagagatggacggtcactcagcctatggagatgaagaaactgaggttcagagaggttaagagactccactgaggtcacacagccgatgacagacaaccttctgtgccttcatcaagctggttgtgtacccaccatgtccctggcgacaggatgggaaagaaaaagccctaattaaggatcgtcagaaaccacagttggaggaggacggcagagacagtttccctccccgctataccaacacccttccttcgaggtcctcgctcctgagggaccctggactgtcacagagattaatgaccccttatcttctttggatgtgaaaggaaatcactggttaaagcttgatcgagagacattatcagctctttaaggattgcaggagaataggctactttattttctgaaaaggtaaatatatgcaagcaaagccaacatgccacgaatggcgttggtctaccacacagccgtgtctgggacacagttgggggtcatcccccagcaggagtgaagtcgagcttagcggcccttgtgtcctcccttggaattcctgccatcccttttgattgagcctccacctctgggatttttcttccatttttctcctctcttaggagggagttcctgctacccatcgtgggaggccaccatcaggactgcgaagatggtgaccctgcggaagaggaccctgaaagtgctcaccttcctcgtgctcttcatcttcctcacctccttcttcctgaactactcccacaccatggtggccaccacctggttccccaagcagatggtcctggagctctccgagaacctgaagagactgatcaagcacaggccttgcacctgcacccactgcatcgggcagcgcaagctctcggcctggttcgatgagaggttcaaccagaccatgcagccgctgctgactgcccagaacgcgctcttggaggacgacacctaccgatggtggctgaggctccagcgggagaagaagcccaataacttgaatgacaccatcaaggagctgttcagagtggtgcctgggaatgtggaccctatgctggagaagaggtcggtgggctgccggcgctgcgccgttgtgggcaactcgggcaacctgagggagtcttcttatgggcctgagatagacagtcacgactttgtcctcaggatgaacaaggcgcccacggcagggtttgaagctgatgttgggaccaagaccacccaccatctggtgtaccctgagagcttccgggagctgggagataatgtcagcatgatcctggtgcccttcaagaccatcgacttggagtgggtggtgagcgccatcaccacgggcaccatttcccacacctacatcccggttcctgcaaagatcagagtgaaacaggataagatcctgatctaccacccagccttcatcaagtatgtctttgacaactggctgcaagggcacgggcgatacccatctaccggcatcctctcggtcatcttctcaatgcatgtctgcgatgaggtggacttgtacggcttcggggcagacagcaaagggaactggcaccactactgggagaacaacccatccgcgggggcttttcgcaagacgggggtgcacgatgcagactttgagtctaacgtgacggccaccttggcctccatcaataaaatccggatcttcaaggggagatgacgcagtgaagggctgaggatggacgcactgtcacacctctgcatttccagccccagcatcttgctggagccgttccatcccggagcttggaggggcagcctcaggtgtgtgcctgggcaccgctcacagcctcttgcacccagccgttggcagcatctactcagcaaggtcactaagctctgccagcgtggcagagcatgtcttggaacctgtcttgagtggggacaacgtccccccactgctgccctagagctggggagacgctgggaaaggttcaacctccacacactaaaatcattttggctcctggggcaagcttggggaatgaatgtggaagatgcctatattctgagagacaggacagtttcccaggaagatgggcagagacttgagtggcgattacctccagcacagagacgtgccaggcggtgttggcgctcggggcgagatgctgcccttctttgcacgaagcctggcctcttgcttggcgtgataaccctgtcatcttcccaaagctcatttatgagccaccagaggctcctaccccaaagattttcacagaaacttgaggccaggtgccgtggctcacacctgtaatctgaacactttgggaggccgaggcgggaggatcacttgagcccaggagttcaagaccagcctgggcaacatagtgagactcctgtctctacaaaaataaaagatttaaaaaaattagccaggcacggtggcacacacttgtagccccagctactagggaggctgaggagggaggatctcttgtgcctaggagttcgaggctgcagtgggctgtgatcacaccactgcactccagcctgggcaacagagtgagaccctgtctctga

SEQ ID NO: 138 - protein, 338 aa, Homo sapiens; identical to SEQ ID NO: 132

SEQ ID NO: 139 - DNA, 30642 bp, Mus musculus
agcaaggaagcggaagttggcaacggtgtgggcgcttatgtctctttgaggaggccgaagagcctagggggttgattttgatggggaagagatccccaggtaggtggctggaagggcccaccgggtagtaacctctagtgtggagaaggtggatggagggaagccagccgccttctggactaactttcctgttgccactggtgattcagcctaggcgctgaggctgatgctaccagatgccatgcggtgcctccctcctaccagaagtttcttcagtgaagttccccatctaaggaaagtgtgtccatttttgtacagtcgtcagtatgggtctcttgtgtgactcggtaaccaggctcactattccaaccccccacctcccgttgaaaaatgaaaaaggtgccaggaaagaccctggctagcgggagttgatgctctcagtctctaccctccgttttttcaacattctctccaaatcacttgtctttcttccatgccacagtcctaggcggtgtactttatgctgtagatgagggaactatggcacagagatgacattaattagggactggaccttaaatccctgcggttgattttaaatgcactgaggtgacacctgtcaaagccacagactagccgttcccttgggggttgagagtagggtgggaactgtgacttgtgcacccttttttcttaccccttccttccctaggatggaggttaccatgtaataagctttgggaaaatcgctgaatgcagaagtggctcaaaaaagtttctcggcctctttcagtgtggagttctccattcaaaccgtaacttctgtaatttcttccaatgccacggtattcaatgtagtggcttgataaacagtctcgggcagaaccagtttcctcctgagccaaactcaagtctgtagtcagaacccgaagaaacaagaaccctgctttcctcctagcactgtttccaatgttgtctttttcttagatgctattgttaatattgccccaactctggatagttttctagattatttattttattttattttattttattttattttacatgttttgtgtgcatggacatctgtgcacctcatatgtgcagtacctgtggaggccagaaggggtgtcagagccctcgtaactggagttacagttcgtaatagccaccatgtaggttctgggactagaaccctggtttgctggaagagtagccagtactcttcaccaccaagccatctctctaaccctgccctctggttcttcaatactttattttcaattacgaaatccaaagtttcgaagaccagtttccccttttaacttagtagtgaaacctgaaccgaaatgaggtcatatataacctccatgccaaatgtctacaagttttgctgcaaatatgttggtggggcttgttgctcagagcatccctaccccttactgtgtgtgttctgtaatgtctgctataggcaccacagtgcttccctaaacaaccagacttcacttcaaccggcctcaaggaaactctatgggattgtggaccactagtctaacatcatctggtaaacgctttcctgtctcaattttggtaaaatgacagggaagaaacagtgttggggaagtgggcagaggcaaaaagaaaactaagagacttcttccaggccaggcgcggtacacacacacacacacacacacacacacacacacacacacgaagagaaccagattgagcttcatcatgtattttcttcagaaatatttaaccaagaaagttccttgtctaaacagggagcgtgatttacatgtctccacaacgctgtataaatggttctcgagaggtatttgttgattgctttgaaaatatttgctcaaattttaaacttttacatacatgactattaaaggctttggaatttttttttttaatgtttgaaattgagagctgtagaatcagttccaggtttcccacagcagactcatttagtcatctggtcattctatcttctcatgtgtcctgcgttcccaccatggctaggtggtccttgtatgtaggattgcagtggtaagtaagacaggcaggtcaaggtctcaacccttcgggagcttctagtctgacattatttgccacaatcaaacaagaagtagttaagtacatattattttaaatgtcatgaaagaaatctaagtgccaaaaaggagatcaattgggtgttgagcagagtattatgggatgacctttacagtgagataagagatcagagggatgatgaatcggagacatgaattgcctttctccctcttatttcccagtgtgatggtgacacaggtggccagacaactgagagtcaagtgtggaaacttgcctccttgccaccgatttttgtctcagatgccatatagtcacaaggagcctaatgacaggggcacatcctgagacatgcacaattagatggacacagacatagggtgtccttacccagtctcagacggctatgatgtcactaggtgatgtaattttgtgtgaccacaatcatgtatgacatccttgcctgaggcatctgtgcagcacatgactgtaattacaatccacaggttacctagaggaaacaggaaacagcatttctctatagctgagtgtcttaaacataatcagctcacaatatgtacaactaacaccagctactgaattctttatggccgaatggtgcctcattatatgttcatggcactctgtgtgacaagtgatattaattgacctatctagacttttttttctttgttgtaacagttgagagtgtatttagttttgacacggtgttaggcacatccattttaaactactgttttgggttagaaggctcttaattttttttttcagaaaacagaaaatttgtttacgaaaatgcttccaaaatttgaggatgcagtttagagaatataggaaaaatgaataataaatgcagtctttccaaaatatagataggtagccataaaaacaaaagagtttttaacaactgttcaattccagcaagttataattctaaggcagttttttttttaaagaaaaaatagatctgtgaagacatggatcaatatttgttattctaggctggtgttatggtgcagctctgcattgagtgagtttggtggaggggaaaaaggacagtagaaattgaaaattttaatagtgtgctgaaccattataaatcaggttttcactgcaggaggaagtcagacgaaatgttcacattccgggtgcatacgagacaaccagaacatcacagaaacacactttctttttcttcataggatatggtctctttctgagaaatcttattaaagcaattatattttgtatctaatttatttcagactgcattgggtttaaatcaaaaggtagaggggctgaaagggttaatgatctggttttgttttttgtttttttaaggtgatagttcatttaaccatgcatctgaaaattatgttttcccttgatacacagattaatcaggcgtgagctagaagctgaggaggccaaggaaacaaaactaaaaataccaaacagtcgttatgagtttgatttttttttctttcttttggatgggtgcagctttgatagcaaaatctgattatagttcatctagacttcgttgggtctggatgctcatcagggcttgaaatcaatttggcacagtgcctttgtccctgtcggaggtgaatcaccagagaaattacaaactaagtgactcaccttcctgcagagtaatgaaaaagaggaagggagtttcatgtaaatcagaaactggtaattctcaagtatcttgcgaattcttagggccgagtaccggtttaagtttgaatgcgtttttatattaacctaaatgcttcctcttctatgtatggggaagctgtcagactcctgctaatcactccaggcctaagggagttcctcacgccatgtcatttataaatagcactttgatactgttgaatgttaaaaccacacctttttttccctgaaagcgagtaaagaaagtaatcgaagctttccctctagtttgctaggctaagatgctgctttggatactgtgttagctgtaatccacaggaggtagagtatttatcttaacgccggctctctagatagaccagagagcagcacctactcaggtttgatcagagtgcttcatggttctgcagggaacagggttctgggtacgaggaggacctcacactcaattttcaccaccattcaaattatttccaggacacagtgtgtataacaacagcttttgttaagaaagaggtgtcagagtgcaaattccccctgaactatgaatctgtctcctctgtgtgtacgtctttaaactcgtactccttgtcaagggagctgagcaatattttctgcagaaccttttaggagcagatagactacctatattctctggatagctgaggtcagtcttgtgagggattttcccgtgtttatcctaagcacacctatatagagtcctttccttcctcaggctggtgatgtgacaggctttcttggaaactaaaatttttttttttttcagactaacttggtctcctgtagacattttttttttttttttttttttgaggaacttacaccacattttttgtactttccttgcaggaaatcgatactttaccaggtggagatgaatcatttgtgtttgagagcggcagaacttgggacgaatctgtcaggcgctctgtaaaccagtcactcctgacccatcgctctcacccacctccaccccctcctcagactcactgtagctatgtcattcaggaggcaagtgaagaacttcgtgaaaaattactcagatgccgaaaaaaaagtcagggaagcaacttccaatgacccctggggcccctctagctctctgatgttagctatcagtgacatgactttcaatgcggcctccctctcggagatcatgcacatgctgtggcagcgactcagcgaccacgggaagaactggcgccacgtgtacaaatccctcgccctgatggactacctcatcaagaacggctccaggaaagttattcagtattgcagagagggcgtctgtaaccttcaaatgctaaaggattttcaacacatagatgaagcgggcaaagaccaaggtaacagtttgtaaaaattcgacagtgtgcctgtaaggacaggcgtgtatagcagtgttttaaatcttcaactggagcaaggcggttctcaatttttgagtgccttgtgatgtagcctaggctgtcctgagcttgccctccagtcccaacctccctcgcgctaggttgatgtgcaccctgttatcaccctgggcttaaagagttgtccttagatgtcccagccactgttttcctccgaccgctgtggttctcatttccgtcctctgattgactgtggcacttgggagaagagtgtgtttgttttcaaaagagcacagaacacacgcaggtcctgatccagtgacgcctcacagaaaagtaaatacagcaaatgaagagaggagacgctgccgtttgtgtgttgatgtcactgtaattcacgagtataattaagtcggaatttagtcataaactagggaagtgtttctagggactctggaatctccgaaggctatggagatgagctcacttaactgaagcacagaaattcaggtcttaagataattctgggtgtagaaaggcgatggcataggaagatggtatagagtattgaagtggattggtgccaaatttgcaaagaaaagagccaacattcctttcctttgtgttagaaatgcaaagttataattgtgcctaaagtgataggttttaagtcataagaagaaaatacagttcactctactctccatggttactgcattttaaaatgataactttaaagaaatgaaaaaatgagacaaaaatagtttctatgaacccttctccaccaaaacatcatctctccagtttctaagatcagtgaggtacacttgctacaagtggcagccagtgttgacactactactgatgttcagtttagttgtatcatagttctgtaggttttggaaagacatactgtcctgtgtcaaccacccagtataacacagggtctttcgcttccccgaggatgccttgtgacctgccctcaccctctttgccctggatgccactggtctttatagttttactttttccagatgtaaaacttctttagactcgtttctttcattggcaggataccccacggttcttccagatccttccataggttggaagcttgtttctttttatctttcctctttatgaaaaggtttgttgagatataatgcatataccatacaaattgtaacatatgtgtatatatatacatatatatatatatatatatatgtatatacacacacacacacacacacacacacacacacatgtatattataaaatatagggtcatttatataaagtatgtataattataaagttgtttattataagatgtgatatctatatcaacacttgcctttttgtattcacttgtattgaatttttttttcaatcagaatctcacgtggacttgagttaataagtagctgagttgagttcaccttgaactcctgatcttcctatccccacctcccaggtgctgggattagtggtgtaagctaccattgccaggctcatatttccatttgtaagtgtgcagtttggtacgttcatcacatttactgtgttgggaagccaccaccactcttgtttaaaccttttctaaatcactgtcagcattaagcaatagctgctcattcccattccactgaacctctattctctatcttgattgacttgactgttaggtgcactcacacagaagtggaattttcctgtgtattttaaattcctattaggcttctttctctcaccctatagtccttgagtctcctccatgtggtatcagaatcccatatgtttgaatgactgaatggcattttattttctgggcttacaacatttaagcaaacctgttcctctggggcggttctacatgtgatccctcatgaacagtgctgcagtgaacatggctgtgtgtgggttcaggcctctgctgtcagtgctttggcttgcttagtagaatggctatagtgtgctaatgtgagtgtctggcctctggaggagctgctgagctgtcgttcattcccatgacctccataagaggtttcatttttcccaggtccttgctagcacttgttattttgtccatcttaaaattacagttaatcctaatagagttggactttgctgtccctttgatttacatttccctaagacccatgagctcaagcgtcatgaccctgctgctgctgatacagctgttgacttctagaaacatcttttcaaattcggtgcctgttttcaaatgagttctttcattgttgagttttgaaagttctttatatattctgggtataagactcttatcagataggtggcttgaaagcatcttctgttattttgtaggttgcctctttgctttcttgggatgtctgtcttcctatgcacaaaattttattgttattttaaaacagagtcttactgtgtatccctagctggcctggaactttgctttgtagaccatgctggccctaagcttacagagatccacctgcctctgcctccctgggactgggattaaagatgggcacaaccacatcttgctagaagttttaaattttgatgaagtctaatgtatttgtttttcatttggttgctttccttatcatatcatatataaagcaaattattgtcaaattcaaggccgtgaaggcttatattttcttctaagagttttgtggttttaactctcttgactcccttagcatttctgtggctgtgatgaaacaccgaaaccaaaaagcaaggtagagaggaaagacaggaactcacacagggcaggaacctggaggcaggagctgatgaggaggccatggaagggcgttgtttattggcttgcttccatggctttctcagactgacttcttattgaacctaagggcaccagcccagggttggcatcacccacaatggcctgggccctccctaatcaatcactaattaggaaagtggcctgcagcctgaccttgtggcgcatttccttagttgagattccctcctttcaggtaactctagcttgtgtcaattgacataaaaccagccagcacactctcttattcagatcttggatttctgtgactttcatgtttctgtgtgagaggaaataaagagccttcttcaatattttttcatatggataccttaccacctgttgaaaagaatgttcttccctgttgagttacactggccccttatgctaagttacttctgtaatctgtggatctcatagctctctatgtctttccatatgccagcacattgctgtatctttgtagtaatatttgaaatcaaggagtgtaagtatttcaactccactcttcctttttaatagcattttatttatttccggtctcgttcatttccttgtggatttagtgtccacttatcagtttcttttcaaacagatggtagataaaattttggttgggattgcattggctttctagacaaatttggggagcattgttatcttattgtgaactttaatttattttttaccttttgcatttataatataattatatcatttctcctctccttccaaactctccaacatattcccacttttctctttaaaatttatggtctcttttttgggaaagttctgctaattaaggtcaaagcccaccatgaccttgtctggagaattctaagctcccacatctgcctccacctgaggaatgtcacgtagcctcaattagattacttccttctcctgataaagcctgtccagccagcgctgagattcatgggatgcttctccatgctgatgagacatcttggtgcccaaacctcagccagtgacatttgcctatccaggatgttcctactctcagtcccctagaactttataagccttaaatcaccctaagtgaagtttatctgccttctgatagctggtcctgctgtggctattcacaaaatgtactcacagggcttctgaacatcctcccctccccccagccccgtcgtctctgctctctctgtccaactggaccatatcaggacctttgatccatgagagagtatactcttgaatatacaaataccacctcatcagtccataaactgttacttgtacgtatatgtattcatagctgaccatttggagttggataaccagttggtgtgctcttctctagtgggtatttctccagctctcagctttttttggttatctgtagttctttgtctatggttgagtcttcatgagctttcttccttccaggttagacatctattggtattgtccatattcaggtcttgtttaggcagccatgttggtgagacttcatgggtgtagcttctgatatttccaggaggcgtcatctttcagcacacttcctgttccttgggctcttacgaccatgcgttttctttggttgtggtttttctgtaatggtttccctttgttgcaaagaaaatgttccttgatgaagggtgagaactgtactaatctataaatatgaaggtaaatatttctaatttagataaagactgtgctcttttattaaaatgacagttgtaggttctcctccaagatccatgacctcagtacccttgagtagttggctaggtttccagagccaggcagtttccttcttgatgagagggccttacacccaatgagaaaactgttggttcctgccacaggatgcaggtcactgctgcatccttagtatcattgtgccatgccggttgttgatgtggtccgtaggcaacatggctgggtagcactgttggttgtctccatccttgcgagctgcatgccaccttctggccatgaaaactagaccttcaggaggaggcttgcaggtcagatccagctcaggtcctctgggccccatgtgtctgaagtgcatggtgtcttcaggaacagggacttaccttctacctcttgggggcaaccaaggacaacagaaaagactgtaatgttttgtggtttaagttctcttgggcaaccctgagcaataactccaaagcaggcttctcatgcctggttgttgttatttgttgttagataatctatggctcttgggagggagtgttgtcaacccagactggaaattttcatttaaactacatatatatctttatatactcacttatatgtattagaggtatttttaggtagattggtaatatacgtgtgctggctagttttatgtcaacttgacatcagctatagacatctgaaaggagagaaccttagttgagaaaatgcctccatgccccttcttagaattggaaacaaaacacccatggaaggagttacagagacaaagtttggagctgagacaaaaggatggaccatctagagactgccatacccagggatccatcccataatcagcctccaaatgtttacaccattgcatacactagcaagattttgctgaaaggaccctgatatagctctcttgtgaggctattcttgggcctagcaaacacatccaatagctgactggatgctcacagtcagctattggatggaaaacagggcccccaatggaggagctagagaaagtaccgaaggagctggggggatctgcaaccctacaggtggaacaacaatatgaactaaccagtaccccccagagctcgtgtctctagctgcatatatatcagaagatggcctagtcggccatcagtggaaagagaggcccattggtcttgcaaactttatatgcctaagtagaggggaacgccagggccaagaagtgggggtgggggtgggggtgggaggatagtggaggggggcatgggggacttttgggatagcattagaaatgtaaatgaagaaaatacctaaaaaaaaatagatctgggtgttgactggccttggtggtacatgcctctaattccagcacttgggaggcagggttgggatgttctctgcaagttcaaggccagtctggtcttcacagggaattcagagatgctcaggactatgtagagagactgtcacagcaggaaagcacaactgcaggttggaggagcttcctgctattaccactgtgcctgatcactgccatatttccccattatggtggactctgaccctctggaaccataagacaagcaagcccttccgtctgtaaatcgtcttggtcatggcactttctccagtgttgagagtagacggcattcccttgttcttacttctaggaggaaagcttttgggcattaaatgtgatgttagctatgctttttttttcttactttcttttttgttttgagacagggtctcactatgtagctcagactagcctggaaatcacagtcctcctgcctcagcctccctcctaagtgctaggattacaggtttgtgatactatattggttagctgtgggcttttttatatttgctcaggttgaataggttttattatgttcctgatgtgttaagtgtatttcgatattattattattactactacttgtgtgtgtgtgtgtgtgtgtgtgtgtgtgtgcgcaggtgcttgtgtgctacagcatgcatggaaaggtctgagaacagttttcaggagtcaattctcttcttctactatccccaacaggttctggggatgactgtgggtcatcaggcctggtggctggcccctttatcttctgagggccattccactggccctggagtgtattttaaaactaagaaaccatgttgagtgttgtcgatgctttttatgcatctttggaggtgattatgtgttttaaaatccttttagcctgtgaatatgcctatgaccttgattttctacatccctaacataaatcagatttaatcacgatgagcatcttactttttaagtgtttattttagattaggttttgggcttaataatgaatttggagaactcttcatgaggttttatcctgctgtgcttgattcattcagaaattttttatacaaatcaacttccatgaagattaagtttttatttattttttttgattaaggtctcactgttttactatgtagtccaggctggcctcaaatccacactcttcctgcctctgcttcctgaatcgtgtcataaattcatttttacaaggaaaaacaatgctaattaaaatttgcagatttccccttgaaaattctagagcagctgttttatcactggactaagaactcggaggactttgtaaagcagagaggctggttcctgctctaaagagctcctgagtattctgaagaaggagctggagaagtatagaattacaaatgctcagacaggcccctttatgcattcatcacagctttcctgtgagtgccggtacgagtacattcaaatctgtcttcatgaaggtttctcagattctctaacactcgagcttaggaccaaatattcgagctgagtacaacagtgcaggtgcctcagggactggtcattactaagacagcaagaaaaatcactgatcagagctggcttgtccacagaggatcaaagctggcatgtccacaggggcatctcacatttgtccgttcactttgcaagggatatcagcacatgtcacatttattgactatttactaataaatgaaaataattgcattggaggatattactttatcttttacatacctccctttttgcgtttatgccccaggaaatgttgtattgtaggagagagatgctcttggcataattcagtttatattgcggtgtgcctctgtgaggatggtggagatgctgaaaagtgttattgatgggatgtacagtcaagagtttggctcccaacttgtctttgtgcttttattccattagccttcaatgtaggctgcactgtcaacaagcactgctaatgtactgctttgtgttgtgccccagaagttctttccctcgagaatattcacttcttgctgctgttgctttccctttagtcttcccgtcccctccagagatgctctcctgcgtgtgcctgctctcctttccctccctgagcagtggcgagtgcagtgctgttttatacatgtcggtgtgctgctgtttaggacacgctgtgtgggtgtatgtgatgtatgtctatagcgtgtccttaaccagattctgagggcacataccacctgtgagccatctttttaccatcagactttgggacatttaaaaaagagaggagggacccaaaataaggtgctggaccatcgagaaactgctgggtaaaaatgacattgctggattagagaagagaagagggtctctgaaaaagtcctagtatacactgtgacccaagtaattctcaccggaagcctgtttgactcacagattgacaagagaccagattctctttaccaaaaaaaaaaaaaaaaaaaaaaaaaaggtcttctggctttgttggttgacccctaaattcaatgttctctttgtgtgtgtgtgtatgttttgcggggagatatactttggttgtgccccataaattttaataagctgagtttttgttctactcaagtgaagtcaattttcctttttcttttccctcctttttcttcttcttttttattaaaagaattatttgtttattatatatatatatatatacatacatatatatacatacatacatacatacatacatatatatatatatatatatatatgagtaaactataactctcttcatgcgtaccagaagaaggcatcagatctcattacagatgattgtgagccaccatgtggttgctgggaattgaactcaggaccttgggaagagcagtcagtgctcttaaccactgagccatctctccagcccccccccccttttattctttaacccatgtattattcagaggtgtgttgtttaatttccaattatttttggattttctagttatccttttactgatgtctagaagaattctgctgtggtctgaaaacagatactgtatgattttatattcttgtaaatggattgacatgcgccctggcttagaatgtgacctgtcttggtgaatgttctgtgcgagcttgatgagaatgaagtagcctataaatgtctattgcattagtgtttcttctgtggactcggaggctctcgtggatgtgtagatgctaaggactgttctgtctcctcagaaaacgatacctatgttgccacacagtgcccttcttaccatggatgggtttccttggtctgatttctgatgtgtctgagattaattatgcttgcagtagctgctcatgctttctctcgattggtgttagtgtggtatatagttataggttcagttgtttttaaatcatggggcataagtctttgaagaggctattcatagacaaaatagtttgtcttctccctccacccccatgtgtgtgtgtgtatgtgtgtgtgtgtgtgtgtgtgtgtgtgtgtgtgtgtgtgtgtgtgtactgaggccaggggagggcatcagtatcctcttctatcagtctctgccttgttcctttgagccagggtctctctgaacatagagttcatgtttttcagctaggctagtatgagccagccccatgatcttcccagtgctgggacataggcttgtgagagaacacatccagccggtcgcgtggatgctgggatctgaactcccgtcctcatgattgttcagcaattggtctttaaccattgatccatctctgttgctagcatacgtaagactttatcttcaggaacaaccatatcaggcctagctcatctcctccctgacccctaaagatgggtctcaatttggtactcagaccaacctcctatttgctgtcctgtcttagtctgcccagtatgtacaactacaagtgcagcccactgtatccagtgtctccattaacgtttaattcttagaatgtttttatatttaaagtgagattcttgcagacaacatttatgtagatcttgtttcttggggccaattctgttctttaataagttagcgtactggtactcagactgatttctcatagtaggattaatagctgccattctttcttacagtttcaatccgttggccttgttttttgtctcctcctccctcctccttccctccctttccttcttttactggtgcttagatataagacatggtatagaccaaccctctgcctctttggtttagttgctggttttatatgatctccttttctcttctctggtgtgtcagttctgcatcctttcactcatcctgtggacttccgagtttgcagtatatgtgtgcagccagtctggctgcattattaagcactgtgctatgagttggctaagtaccagagaggcttggttcctagtcaggggcactattggggagtaggtggtgggcctgtaaagaggtagagcctagtgggaagccactgatggcacaactttgaggaggatttatgagaccctagtccctttctcctctcttttatgttttagccatgaggtgaacaggtgggtttttgttgttgttgtctgttcgtttgttttaaaaaacacattctcccttattacaggtcctaaatcagcaggatcaatcaatcagtcatcatggcctgaaatttctaatagcgagatcccaaaataaccctgtcctctgtataagctggactgtgttacagctagggagagctgacaagtgcacactgcacgacctcatgggtaatgctagtatcatatggtaacaaagtaattctaggttttcttccccataccttatattattgccatcagtcatttatacataatcaagtatattcttaccaccactgcagtaggctctcatagccgggcttcccttgccctcaccctggagccaagaatgatttgggcttctgctcctcctgcacacacttcccagtgctgctggaattacaggcatgggccaccaggccaggtttccaaagtgctggagttggcacccagggctccctatgtgctaggcaggcagtctaccaactgagctatatccagccccggtgtcagttactgttgtgaaaaaactgctgtgagattcatagagaataaggaaaagaaagatgctcttgtttctccctttactcacaccagctctggtgctgttttctttcatgaaaatctgtttctggccgtggctgtgttacttcttattaaagaagacctttgaacattccttgccaggcgagaactctgagagtagatctctgagttttggttggagaaagtatttccccttctcatttgaagggtgtttctcagggtacagaattctgcctggtggtttcccttgcaccaattttaatatttctctttgttttctccctgcttgcatggtttctgaggagacgatgaatatggttcttgtctttgttcctttataggaaaggcttttccccttttggcctctttctttacctttgatttttctggagtttgaaaagaagaagctgggggcggggggtgtttctgagctaatctggactgcaacctaatattaatctgggagcagttctcagtggctgtcgctgcacatatttggtcattagtttctttctctcactctcttcagtccccaccaacacctgctctgtcatggctgtcctgctggtgcggagagcagagattctgctctgtttcttttccatgcgtttctctctgggtctctactgagatgttcccaagctggaaggttcttcgctcagccatgtcctgtctaaaggcactctttggcatttttcatcttcatgctttctttttggttcttgtagtttttccatccctctgactgctcctctaacattgcacaatgccctgttatatgtgcagtccacatctcagccatcgcagtttcacggtaattctagcatccctgccaggtttgattgtacttttcatgcttgctctgtcttcagaccatgcttcttgccttttagtctgtcttgtaatttttctccaatctctgggtttgatgaacaggtatgggggactgttggaaaaaggtttctctacagtggtgtcatggtaagaaggcagcgagaatgtactcatcttgaggctaggtctctgtgttagtgagcctgtacttctgggatgaactccatccgtgctttccacttaccgcacctgctaactcttcagtggcgggaccactagagtagattggagttgggtatttcccttctcccaggttggtgaggcttggcaagatcagtgctagttaatacatttctctgagggtagggcttaagaaacatagagtgctctggtctatttaaaaaaaaaaaacagttctaatcctatctctcctccaacagaaagagctggggttttctgtgcctgatttataactgaacatcaccacaagggcacagatgtaggaaaagcctagggcctgtagggtttggactatccatagcttgagatgcctactggaaccttagaacatatccctgtgggtagggggttctgctgggaatatcatctctcacagagacaagaagctaaagctcagagggatgtaaggctgtacaaccactaaactgaacacagttagaacccatgcatcccaactccacttaatcagattctgttcctataccaaagagcctctcataaccaagcctgtaaaatacctttacaaggtttcagtgaacttctagaatgtgcttaattgaaattgtttagtaaatgctcaaagaaatgtgaaactttgtcatactatcaaatcatacacttagacaaatatgtttttgtttttttaagacagggtttctcatggtaaccagccctggctgtcctggacttgctttgtagaccaggttggccttgaactcacagagatccacctgactctgcctcctaagtgttgggattaaagatgtgcaccaggacgctcagtgatattcttctaaaactagatttttgaaaatatgttcattataggttgttaagtgcctttttattctgaactaagtgagttgtgaaattgcagttgcttttatttacataggccatttttgcatatatccacatatttaaattaaagtcatatttcaaaaatggacacattttaaaagaacaaaatttcagtgttattagaaagctatgtaaagccattttcctggaagtagcagactttggtacattgctatgttggcttcctagggccatcctcagtctctctcttaggaacaaggcatctcacatccgtactcatggctggtttgtgtctagggtgcttctgcttctctgtcctgtctccaacagtgatgcgccgtaccaataacccaccaaactttaaacaaaccaagccttttatttaagccctcgatcacaactgtacattaaagtgcagaagcaaatattctagaaatataatgttttatttatatttataataatatttatacttaggctataaatgactaaaatctcttggggtggtttggattcagattctcaaagaaggaaagaaaacaccaggtatttgatttctttctttctttttctttttcttttcttttctttctttcttttttttttttttttttttttttttggttttttgaaacagggtttctctttgtagccctggctgtcctggaactcactctgtagatcaggctggcctcgaactcagaaatctgcctgcctctgcctcccgagttctgggattaaagacatgtactacttaccatacctggaaagatggctaggctgttaaaggctaggctcactagcaaaaatgcaagaaaaacaccttttaaacacatgagtatttactttagatgtgattagccaagtcaaggctacaaaatcaaacaactgcaaacaaatcaaacaactgtattgctcctgtgcagagaagtctagacctggggttgaaggagacagacagttctcagccagtatgatacagcggctaagcactgtgcagggaaagctctctagcttcagagtggatcagacttaatgtcttcttttttccccctactcttgttagacagcactagtcaaaacattaatctgatgtgtggttgcagactaataaatgcagttttagatatgcattggtggtgggctagttaatgcaggctcccagagtctttttgtttgtttgtttgttttttgtttttatgaaaggatgttttccaaaacatcacaggttttgggtcgtcatgagcctgtggctttagcttatatcactgtgcatttaagcacagttcgtttacttaacacagtgacatgtttcagccgtttgttccctttcaacaaatagagttggactgataattgtgagcacaagaagcaaggcttgaattcgtttaaacttgaaagtgaccttccctcacctgctaagtctttctgctgtactgtatttatcgtgcccagcaaaggcagagaaagcaaacagaagagagagagggagagaggcaggcgagggctggcagtgctgtgtcaacatagttactctggattctcatcagataaatagcaatggatcataggccaaggtcagtcaaagaattgagacgtgtaccatctttactgagcctgtctctgctccaactcactaacactctgactttgggcaagtttcttcatcaccttaagccttgctattctctttcataaagtagacttcataatgagctcggagagtgcccgttggcattagagatgtatttgagggtcaggcacataacaagccatcagtctaatactattagggcccgattttttgttatctgcatttcttgggacatgtgctctcactgaaacagagagctcagagcgagtgctcagtaggaaggccttgcctatggtcctgggtaagagatgcagttctcctcagccagccccatgtccatcacagtccttagtacactggcattaagacctcgatttacatgccaattcctccctccgcctttctctctcttggtgtgtgtgtatgtgtgtgtgtccgtcctagtaaaagtgtcaaatagtgttttgaagagagtgcttgctgtgcaagtgtggggacctgaattcaatccctagtacccacataaaaaaaagtcaggcctcgtggcacatgctataatcctaacactgaagagacaggacaactggctagtcagcctagcctagtcagtgagctccaaggtcagtgagagacctcatctaaagcaaccaggtatcaagtacagggatgatagtcgtgagctatatacttggaccaaagagcacactgtaaagcgaaggaggaacaggcattcaaagctagcctcagctacatagcaagtttccagtctgtctgagctctgtgaaaccctgtctcaaaacagtaaaaccagaaaacccaagaactctgggaaggctgacgttaaaacttaaagggtttaaagctaagagagaaccaagacgctgcacagcctccagggccttggttttatattccccacgtctgtccgaaggctcaggcatactcctgacactctgttctcccatgtgctctggaaggctggaggccagggatgctgagaggcagggagactggcttagcagcagagtgctgcatgacgaccttgagccaaggtactaaagacacttggaagggaatttctacattttatcaggtgctgattccttcctggtgtgctgggtacacgagggaggacacctagggcccacaaggacacatgcttggtgatttgatcagggaggagctgtctggaagccgcagccccaactgaatgcctttatgagtccagctcctccccttccttgactacttccttctctaaaacacatctcacctaactcctccctagaacctccttgaagagaagctagcagaccacacttgactcttctgttaattctcagccccaaccaaggcagtgaaggtggacaggccacttgtgggtcttcagctctacttggtcatgtttccaccagggaaatgaagggtctcagccagttcaggccttggcctgtattctctctcctagtttcttctttttctcgagataaccattcatattcattctctctctctctctctctctctctctctctctctctctctctctctctctcacacacacacacacacacacacacacacacacacacatccacacaaacacaaacacaccaggatttctctatgtagccctggctgcctggctgtcttgaaactctctctataaactaggctggtcttgaacccaaagatcctcctgtctctcccttccaagtgttgggattaaaggcatacaccacactgcctggtctcatctcttttttttttaaccccccttctcacccccttctccagctcactctggccccgctcgctccaaccctgatcgctttttttttataatgcaattctaatagaattgtaatctatcacctatcattctctattctcacttatagaagaggcagctgccctagcactttcttagcaagaagacagatgctctgatgggactcccattactttgcccagaagcagggttggtgataattctgagctggcttgagctgccctatttttcttagtgttgtctgatttacaatgctgccattatcctgttgcagaactttctggatccgttgtccagagacattgttccagccccctattggtgggaagcacatctcaaccctacagagagatagtaatacaagacataattgattcttcagtatccatgcgctagatcccagaagaccagctatgaaaatgttagtgtgccattagaactgggcatttctcacaaccgaagcatagaggttgatgagtcagggaggcagaaggatcccagctctgaccccacagccacagccaaggcctcaagtccaggagccactggactgttagcttctaagataatctctttattcgaaatatgggggcttcactgggtagactaaccagcgcctactctgtaaagaggaggaacaacacaggaataactgtgtccatgcttccaagcaaagccacagccaagcaaggccctgaccagaggagccagaagcccttctcaagccaagtgactggaggaccagattctcaactggccttgacaaacaaaacaaaacaaaacaaaacaaaaacaaaccaacaaccaaaaaagttaattttgctcatctacatggacttaagtacccaacaggaaagtataggaaaaaactatagtgattgctatgttgtttttaatagttcaagggaatttcactctacagacataggcttaaccataaaagatgctatttagacaactaattctcactagtaattttcttttttaaaaaatatttatttgtatgtgtatgagtgttttgcctgcatgcatgtttgtgcactatgtgtgtgcagtgtctacagaggccaagagaggacatcagatcctctggaactgcagttatagctgattgagagctgtcatgtgggtgctaagacctgtttttctggaagagtgaaatgcacttaattgctgagccatctttccagccccatacgtaattcagagctttctctccttgcttctttctttgctgtttccttccttccttctctctctctctctctctctctctctttcttcttggttttttttgggggggtggtttttcaaaacagggtttctctgtatagccctggctgtcctggaactcactctgtagaccaggctggcctcgaactcagaaatccgcctgcctctgcctcccaagtgctaggattaaaggcatgcaccatcaccgcccggctctttcttttttaagatttatttatttattttatgtatgagtacactgtagctgtcttcagacacaccagaagagggcatcagatctcattacagatgattgtgagccaccatgtggttgctgggaattgaactcaggacctctgggagagcagtcagtactctttttgttttgttttttgttttttgtttttcgagacagggtttcactatgtagccctagctatcctagaactcattctgtagaccaggctgacctcgaactgagaaatccacctgcctctgcctcccaagtgctgggattaaaggtgtgtccctaccactgtctggctagagcagtctgtgctcttaaccactgagccatctctccaacccctcagaattttcttaacaaggaaaatgctgtccagatatagttcatcctgatctaggcttagtttaatactgcagcacttacctacagccaagagagacagcctgctattgtcttaacctaaaaacccaatgatggttacctttgttcctctccctctgaagaagccatctgggagagacctctgctgtggttctcctgtttccaacactgtttctgggtgcaggtttattgttactgactttacggggaggttggttttctccactcttcttttgtagtgcagggaatagaatccattgagccctagaatttttctcattaatttttttggggacttggcagtgaagtgattcagtgggaacagcacttgctgccaagcttaatcaccggggtttaacgtcccagatcccacaggggggatggagtgaactgactcctgcgagttatcctctgacctccccactagtcccgtggcctttgctacacacacagcacatactcacaccaaatcagcatctatatttattattttattattccaccatgtggattctgaggctagaacccaggttgccaggctggccacaagctccttcacccactgagctttctcaccagttcccttggatcctttgaagcagtctcctgtgtagccctggctgggcttgaacttgtgatcttcctgcctcagcttcctgtgtgcttataggattacaagtatgtatgaacaaagacaatttttaaagtgacatgttattagtgtttgagtatgtcatacttgcatacaatgtatttttatcttattcacaccctactccttcccttaacttctcccagacactctctaatcacacaatcacactcctttccaacccagggactttttttttaattgcccactgattccagttcatgctaagtgttttcctttagaatgtctacctacaggagaccacacccttgaagaaaactgtctctaaaaagttcccgagaaaccattaactgtccatagctccccatgtaggggtaaggactcacgtgttccccctgcctcctgttctggaatgttgactggctggagcttatgcaggtcttggtcaggcaaccatagctgcttcaagttcacaagtacagtagtcctgtctcatccttatggtctttctgtagtgaggtgtgatgcagatgtcccatttaccgttgggcctccaaaggcacatgttctctacatgttgatgggtcgtgagtctctgtacagagaggcttctctggtgaggtcagagaactgcactaatggtgggtatagataaatgagtttagaaggcactttgatgctgtcttagtcagggtttctattcctgcacaaacatcatgaccaagaagcaagttggggaggaaaaggtttatttggcttacacttccatactgttgttcatcaccaaggaagtcaggactggaactcaagcaggtcaggaagcaggagctaatgcagaggctatggagggatgttctttactggcttgcctcccctggcttgctcagcctgctctcttgtagaaccaagactgccagtccagagatggtcccacccacaaggggcctttcccccttgatcactaattgagaaaatgccttacagctggatctcatggaggcatttcctcaactgaagctcctttttctgtggtaactccagctgggtcaagttgacacaaaaccagccaggacagatgctttagtcagtctgtaaaataatagccacaggttctccccctggggcctgtgagctccccagccagggctgtgaggattcaagactcacctagagcttgtccttctgaacgctgctattttactattacctaactatcttttttggaaacttctggatgagtactgggtcttgctatctgtcttttatggcttttagttacttttagtcttgtggccttactgctgtacttggaacacatggtgctgtttgcctccatcatggctctactcagctgttgagtctacgatggtgaaggtggttagcctccgtttgtactgtagtttcgtagctggatgtttatttgagtcggtcctatcttctggtcctatttgcctcatgctcatcttgagtttgttacatgactccatgttcttatttacatgtgtgtgtgtgtgtgtgtgtgcactcgcgtgcatgtatgtggcagtcaggacaacttttgggattccgttcttccctctcatgttgtttgaggcaggtctcttgtttcagtctctgccactctgggctgctggactgtgagcttctgcggattctctggattcctcccacttccctgtaggagcgctgggatcacagtgtgcgagcagctcactagtatgtgggtcccagggatcaaacttaggtgtcagacttgggcaagaagcactctaccttctgaaccctctctcctgccctgtggtaacttcccaatagtttatttttaaatcttttgaagaaaaatttaaaatcctacagaatattgattctgtagaagaagatcctctagatacatttcattggagtgggactagacttactgactgtgtagtgtgggttagagtgacagcttcagactcatggacggagagggtcttcccacaacttcacatgcccacttggccttcatgctgttgctcagttgtatttactctgttcactgctgggctgcagtacagccttcccaaagtggcctggagtctgagccttgtcgttacagacccaggctagggccaacaggcgacttcacctagttccatgtggtaagactgtgttgtgcctgcttctaggtccatataagtagctctcagtagatctatcccagagagcagtgagtgcagaccctcaccccaaagggtgatctctgacacctaagtggttcaggtcctcgacaccagatcaagagagctcagcagccctgtggcttgagccacacatgtgactttctcctttgtatttctctgtggagttttttttttttttttaaatcttgtttttgaggctggcagtgcctcagaactaccaggtgtgtggagcagagcagtgctttgaagcatagctttactgtgccaacacaacggatggggttttgtcttgtctgtttttgtagtgctgtggacggaagtcaggaccttgaggatcctaggcaggggctccacgagacaccctttcagcccctgactgaaagaggatttttttttttaatagaaataacttggtcagagactttagttcagtgcctgtgggttgggattcttttgggggtcacatatcagacattcacattgtggttcctaacaatagcaaatttatagttataaagtggcaaccaagtgatctcatgattgggggctactacagcattagcaactgcattgaagggtcacagctttaggaaggttgagaatcactgatgtagcagcttctctcttcctgtccctgccctctttaggcctcttagaaggtagattggagggaagattaataggtagataacacgctacttactataggcaacacacgatctgaactgagggagatggagaggaaggatagagttggtgggtttggttggtagacctgatatatgaatgggggaggggcattgtatgttcatattgcccatgtagaatggaagtaaaattcactgcaacaggaatgcagttagaagagaggatgtgggtaggactgttcaagagggaggcaggcagactgttaacatatcttgagtgttattgaagacaggcatatctcttagcacacatattcttctataacagacattaatgcccagaacctctgagtctctccttctccagcatttgggaaacgttccttgccatgtgtctccatttcacacactgctgaatgtcctggggacaagcaagtagagtcctctcctttgtggatgttggaggaaaagccatctatcaagtgggcagcttcaaaccgtgtcacgtctctaagtggccagggctgtgtaccctcctcactaagacttatgtgactgcaccccacattcatgtccagcatgtcacccttccgtactttctttggaaaactcattttggcttgaaatcaccctgttaatacttgctgggtgactcacccagtgcatacatgcacttgtcccctttccttgctgtgtcctcagtgctcagaactctctcttgctctcagctgctcaagggatgattcaatggctgcagaagcagctatgcttggacaccagtctcttgcacagctgctctagtggtgctcatctccagtctcttaccttgtgtttgagagggcccaggttggccttctgcttggccctccttctttcttgttaggtttcagacccaggacaaggggctgaggtgcaccttttacacatcagagcagacctggcctccaggttttcccagcatccctcagtccctacctagcatagtccacccccaaccctgaactttccagtccaggggctgagctgcccttcccccagaggctatgtaacccggacattttggtttcttcctctcttcctcctcttcttccccctttccttttctctgcatgggcactttatctttttctcttcccctcccctctctccttccttgccctccccagagcagcttcccataagcctgcatttaatgtactctgatctggcttggattggctcatttcaccggtggagaaataacttaccacatattgatcttgctcccattctacgtctttattaatttttatgtgtttttattaatatttttgtcacactttgtgattctctcttaaaaatatttattatctttactgtatgtgtgtgggtgttttgcctgcatgatatatgtgcatcacgtgcatgcctggtgctcacagaagccagagaagagagctggatcccctggagctggagggaatcatggctgtgagccaccacgtgggtgctgggaactgaacctggggcctctgcaagagtcactagtacccttagctgccaagccacctcgaagtctcatgctgtgctttgccactggaggttgtgtattgtagcccccaccctctgccataacagtgcacgtgactgcttcaaaccatgccagtcagccatcctggattccttcagtttagaggaaggagagggagccctcagactggagtgagacgcagttcagagaatctgtgttttctaatcttgccccattcctttcttctttcagacaggaagctgttgtccttcctgtgctgtaagggttttatgctgtgtcttccttcgggtcttttcagaagcatagaagtgaatggatgcttttgttgtttatctcctccttgaaacagacttaggggctcttcttgacttttcttacttcttgatatggggctttagaggaaccctgactggtacagagggcacagaatggtagctcagggaattaggcagagtgaaatgagatgcccactcctctttggggcagaatgcagtggcctggccttcctgaagctgctctgttcccttgtgggagtcggatgctttagggaggaggctcccaccagggcaaccatctttctgcttgctgtgcctgcttgccacttggagcgagtgagcttctcctgcaccccaccagtccccacagattctaagtaaaatgttccaattccagcccatgatttctagtttctaattgggggtattgcaggaggctattttaagccaagcaactttctcaggcagctaagttgtaaattggctcccagcatctttcagcaatctgcttcatttacaccatagccaggagaacatttgaaactttttgataatgtttctttcttaattcattcacttagtaaatatttattgaatatatgttatgtgccatcagtgtctggagtaagactcctctcatggggtttatattcccagagaggaagcaaacaacaagggaacacacaggtgacagtgggcaggggcagatgccagggggagacacaaaggaggggggataaactgatggatgaggtggggcttcttcagagaaatgcagctctgaggaggaagcggtgtctgaggagaggacggataagtcggggagcctgcatggaagcaacagctgcctgagtttctgtggtactgggaagaggctcaggctgcaggatgaggtactggtcgggacaaaagggtagcatgacacaatttttttttttttaaatctccaaatctaaacggtgcccctgtcgtcagggaaagaccgctcttgacatcatccccaagagctccagcagacgtccgcttttcatatgacactgagagggcccagcacacactgtgaggtgtccaccagaaactaggggtgttcagaacagggtttaaaaatataaaggaaattcgggaggaagaagtggctaggagacgagactggagaaagtaacctttttgcacacacttgctggtctgtgcacacacttgctggtctgtgcacacacttgctggtctgtgcacacacttgctggtctgtgcacacacttgctggtctgtgcacacacttgctggtctgtgcaggtacaagtggaggccagaagttgagacagatgtgttcctcaattcctctctaccttattttttgagatagggttgcactgaacccagagcgtgccagtttgattagattggctggtcagtgcatctctggcctccggtctaggtttcccagcatggaggctgcaggcacatgccgccactcttaggtttgaggtgggttccggggatctgtactcaagttctcctgccctcagcgcaagcactttacccactgcccaatctccctagcctcacgctcaaaccttctttgcgtgcctgtgttagttgatttattgcagcgtatggatggctttccaagaaaaatccaataatgcatttaaaatgaaaagtataatgccagataagatgcaattccatcacgtattgatgatgtgtttgctcagtgcgcacagagaggagtgtgtcgcccacagtcttcctgcctttccactttgctacattgtcacttcttcattttctttagaataaaattaattatagttttcatcagtttttccatgtttaagcaagctctcgggtatttttcaggtcactacatccgggagaggtcgaagcaggtcataactctgctgatggacgagcagctgctccataaagagagggaagtggccacgtggacgaggcagcggacctcctactccatgtcattccccagcagattatctgccacggggacctcacctacagtgtgcacttctgtgctcatcccagaaagccttacctcggagaagaagcactcacaagactgcaagaagactgcaggtctg

SEQ ID NO: 140 - DNA, 835 bp, Mus musculus
agcaaggaagcggaagttggcaacggtgtgggcgcttatgtctctttgaggaggccgaagagcctagggggttgattttgatggggaagagatccccaggaaatcgatactttaccaggtggagatgaatcatttgtgtttgagagcggcagaacttgggacgaatctgtcaggcgctctgtaaaccagtcactcctgacccatcgctctcacccacctccaccccctcctcagactcactgtagctatgtcattcaggaggcaagtgaagaacttcgtgaaaaattactcagatgccgaaaaaaaagtcagggaagcaacttccaatgacccctggggcccctctagctctctgatgttagctatcagtgacatgactttcaatgcggcctccctctcggagatcatgcacatgctgtggcagcgactcagcgaccacgggaagaactggcgccacgtgtacaaatccctcgccctgatggactacctcatcaagaacggctccaggaaagttattcagtattgcagagagggcgtctgtaaccttcaaatgctaaaggattttcaacacatagatgaagcgggcaaagaccaaggtcactacatccgggagaggtcgaagcaggtcataactctgctgatggacgagcagctgctccataaagagagggaagtggccacgtggacgaggcagcggacctcctactccatgtcattccccagcagattatctgccacggggacctcacctacagtgtgcacttctgtgctcatcccagaaagccttacctcggagaagaagcactcacaagactgcaagaagactgcaggtctg

SEQ ID NO: 141 - protein, 196 aa, Mus musculus
MSFRRQVKNFVKNYSDAEKKVREATSNDPWGPSSSLMLAISDMTFNAASLSEIMHMLWQRLSDHGKNWRHVYKSLALMDYLIKNGSRKVIQYCREGVCNLQMLKDFQHIDEAGKDQGHYIRERSKQVITLLMDEQLLHKEREVATWTRQRTSYSMSFPSRLSATGTSPTVCTSVLIPESLTSEKKHSQDCKKTAGL

SEQ ID NO: 142 - DNA, 31840 bp, Homo sapiens
aagtggggaccggcctgggcccttgagcctggctggagtaggtggaatatcctggggagaggaagtttggtcgttgggcagcggccgactttcctctcaggtaacagcctctgcttgggagtggtggtggggctcaaggcgggtctggaaacatcggttgccttccctcctcccgtttcttgccggcaccgtcggagtccaggtgggggcgggagggcggcgaggccattaccatccgcaggaggtgaaatccctgtggcgtgacgtgacgccatcacgtccctctctccttctagaggctttcctgaggtccagccttcccctccactgccggttctcctagggtaattgctggtctgattctctgtgtggccgaacgcccagcacctggctcatctggtacacagtcgtcatctgaagtgggggttgtatgaatgaagacgaggatgccgaggaaaggccctgcccacagaaagttgattcttgctcagcctccacccgccattttcaaaattctttccaaagcatctcgtttcttcctcccccacggccctgtctggcgattattctttgtgttgcggatgagggaactgagacttagagaagttgttaagtcttagttaggaaatggcaaagcaggacctcaaatcatggctttgaatcctaattaaaggagagagatgaggcatgtgaaggcccaggtgtgagcacattgtgagcgttcaatgaagagtagctgtttactccagggtgtgaggactgtgtcttgtgcacctgtttctccatttcctagaatggagcctgccacatggtaagctctggaagattattagttgaataaattaatgaacacacacttagggctggaaaagattagattctctgcctctgacagtattcttttcatcaaaacagtaacacctcctaatggcatggtagtctctataaccattttcccgtagcattcttggccagagctcatttccttacgagtcaaactcatgtctataggcagaacctgtacaaacacaagagctgttcttttctcatagttccaccttaaatgcatcttttcagagatagctctggacactcagcctcttagatgctattgtcattattgtcccaagtctttggataaagtcagttcagctcctctgttccttattctcaatcctgaaatccaaaaacttttggaaatcaacttttcctccaactcatttggtggtaaaacttggcctgaggccatttgtagtctttattccaaatatttacatgtttttattgcagacatgttaatgtgtttaattgttcagagcagctccacaccttactgtgggtatcatgtaatatatggtatagacatggcactactcttgaaaattccacccctaccaccgcacccaaaagagaatttccacaaatcatctggcctcaaaggattgggataaaagatcgtggaccaatagtttaatgccagctgataaatcatttcctgttagaattcagatgaaatggggggaaggaaacagcattgtgaaagtgggcagatctaaaaataacactaaaagaccttttctacgtaatcatttgttttgctgggaattatttaggagagaaagctccttaactgaatggtaagttttaatgtgaggttcatgttttatatttctccacaaagctatacaaatggtaggtactcaagaaatatctgttgatgatttgaaaatatttgctcaaaactatagaattttacttgacaattatgagagctagattttatttatttatttttttaatatcatgctttataggagtttgtgaccatctgggcaaccaataagaactcgtgtctaaaaaaaaaattttttttgaggccaagcacggtggctcacacctgtaatcccagcactctgggaggccgaggcaggcggatcacttgaggtcaggagttcaagaccaccctggtcaatatggtgaaaccccgtctctactaaaaatacaaaaaattagctgggcttggtggctcatggctgcagtcccagctacttgggaggctgaggcaggagaattgcttgaacctgggaggtggaggttgcaatgagccaagatcgtgccacttcactccagcctgggtgacagagcaagaccctatctcaaaaaaaaaaataaaattttttttttaattagttaggcttggtggtatgcacctgtagtcccagctacttgggaggctgaggcagggggattgcttgagcccaggagtttgcaagcagcctgggctacatagtgaggctttatctcaaaaaaaaaaaaaaagtgattataattataaagctatagaatcagtgcaggtttatcccaaggcagaatcattcaatcattgtgttatttgcacaacacatgtttcttgagtatctactgttgctaattagctgttagggataggattacagtggtaaataagaccgtcaaggtccctgcccccaaggagcttccagtttggtggtgaagaaaggcactgagcaaatgacaaataggtaagtacagattgttacaagtgcaatgaaggaaattaaccaggttctggggagacctaagtagttagtgaggtcggtgaagacctctcagatttgtgacatgaaatacctaacttcttccctctatttctaaatattatagtgagttgggtagccagacaaccaagattcaaatgtggaaatttaccctcttgggcactaattttgtctcatgtcaatttttgtcacatcactgtagttacaatctcacagttatttgatgctgtatgtaaacagcattttcatgtagtcaggtgtctaaaacacataataaaccaacatataatttacaactaacaccaattaattgagctccttgtcaatttgaaaagacagcagtagtagaatggtgttttacatattctacgttcatatcacaaggtaaagttcaagtcattgtacattagtaagtgataagaattcacttctctagacctttttccttgcgatttttctaatggttggggttgtatttaattctgatatggtgtcatgtaaattcattttaaactactctattggattagaaggctattattttgatatttttctgggttagaaaattcatttaagaaaacagtttttaaaagtttaaaatataggttagagaatgtagaaaaacctaaaaattacgattgttcttccaaaatatagatagatagctatccaaaaaagaaaaaaaaattaacatttgttgttcaattccagcaagttatgattctaacagggctttaaaagaaaatagaatcgtgaagaaacagatcgatatttgttgctctaagccaatgtcatagtgcatctctgcattgagtgagtttggtagaaggaaaaaaaggacaatagaaaaaaaaaccctcctgcttgacaattttaatagctttgctgaaatattataaatcagtttttcactgcaggaaggtgccaaataaaaatgactgtgtttgaagtacgaaaaagagaaaatcagaaagttgtagaaacacaacttctctttttcttcctagggttaatgatagtgtctttctgagaaatcttaattaaacagatatttaatacattttcttttttatttatttatttatttatttatttatttatttatttatttatttatttttgagacagagtctcactctatctcccaggctatagcgcagtggcctaatctcggctcagtgcaacctctgcctcccaggttccagtgattcttatgcctcagtctcccaagtagctgggattacaggtgtgtgccaccaagcctggctaattttttgtgtttttagtagagatagggtttcaccatgttgtccaggctggtgttgaactcctgagctcaggtgatctgcccgcggcagcctcccaaagtgctaggattacaggtgtgagccaccacgcccaaccacttatacaggtacattttctgtcttgcttagttaagagtgtgttgtatttttaccaaaaagaggttatctcatttttttaaaaaaaagaagtgatagtttatttgggatgcttctaaaaatttatgtcttcctttaatacacatacagaaattaatcaaggctgagctagttacctgagaaggtcaagaaagggaagcaaaactaaaagcagtgaacacatttgttatggattttaacattttttcttttgtatgtgtgcagtttctctagtaaaatctgattatagatcttctaggtttcgttgggtctggatgttcgtcagggcttgaaatcaatttggtacactgtcttggcagccagcagtggtgaatcactagagaaattgcaaactgactgaccctccttaatacaaaataatgaaaaagagaaagggaatggtttcctataaactgaattgatcattcacaagcattatgtaaagtttgggggctgcatttcccttttaagttttagtatatgggcctctctgtgtgtccttgttttgagatctgatagacacaggctgatcactgcaggatttagagaaatccttgcattatttgagtcttactgttgacactgtttaatcctaaactcattcttctttttccaaaggtgaacaaataaagtaatttaacctttccctctaatttaccaggcttatctggactaaaatagaggttttagggtaccatgaattagctgtggagtccactgatatacagctgtttgtcttcatagttgatcctcctttcttttaggtttagcaagaaagcagactatatttagatctgattctcgggacttgtagttctaaaaagaatacagtcatagggtcagtgggtgattctaagactcaattttacccccattttaattactctcagaatataatatttttatatgtgacaatataaagagatgcctgaaatcctagcacttcagaaggctgaagtgggaggatcacttgaggccaggaatttttgaacagcctgtgcaacatattgagacccccatctctacacaatatttaaaaattagccaggcaggccggaagcggtggctcacggctataatcccagcactttgggaggctgaggtggaaggatcacaaggtcaggagtttgagaccagcctcgccaacatggtgaaaccccgtctctactaaaaatacaaaaattagccaggtgtggtggcgtgcatctgtaatcccagctactcaggaggctgaggcaggataatcgcttgaacccgggtggcagaggttgcagtgagccaagatcgcaccactgcactccagcctgggcaacagagggagactctatctccaaaaaaaaaaatagccaggcatggtggcgcacacctatagttccagctgcttgggaggcggaggcaggagaattgcatgaacctaggagttcaaggctgcagtgagctatgattgcaccactgtacttcagcctgggaagcagggcaataccctgtctttggaaaaaaaaaaaaaaaaaaaaaagaaagaaagaaagaaagagatgtcagagtgcaagttctgttttttaaaatgttgcttgtctgctgtccatgtaatgctttatagccattatatttctggccaaagaggttgaatgatattttctccaggaacttttatgactagaaagacaacctatatttctttaaataatataggccaatttctcatgagggattttcccatgcctatcctaggaacagttatatggtaccctcaattctggctgctgtaagtgaggggctgatttagaaacaaaacctagattttcagattgatttggtcttctatagacttaaaaaaaagtttaatgtaaatttttttgtgctttccttgcaggaaattgatactttatcaacatagagattaattatttgtatttgggagcagcagaactggggaccaattacctgtcaagagttttataaacccgtgacataaactgttattccattgctttcatcctccatctcaccttggaacttgtattacttatggcgttcaggagacaagtgaaaaactttgtgaaaaattactcagatgctgaaataaaagtcagggaagcaacttctaacgacccttggggtccctctagttctctgatgttagatatcagtgacttgactttcaacacaatttctctctcagagattatgaatatgctgtggcacagactcaatgaccatgggaagaactggcgccacgtgtataaatcccttaccctaatggattatctcatcaagaatggatcaaagaaagttattcagcattgcagagaggggttctgtaaccttcaaacactaaaagattttcagcacatagatgaagctggaaaagaccaaggtaatggttaaagaagtttatataagctgggtgtggtggtgtacaccggtaatcctggtgcatgggaggctgaggtgggaggactgcatgagcccaggcatttgatgctgtagtgaggaaagattgcacctgtgaatagccactgtactccggcctgggcaacatagagagaccccgatctctaaagtttttttaaaaagtttatagcatgtgccaataaagattaggagttttgggggatcattttataccaggaggtggggaagagttgtacttaaatgtactagctgtctttcctctgggacggttatagtttccaatttaatcctctgtattgagtcttcagtgccttagagaacaatacttttttcaaaaggaaaaaaaaagtgaacacacttaggtttctgataaaatgatacctcatagaaaatgaaaaaagtgaataaaataggaggcatggcaatttggtgtaataatgtcactgtaatttataattataattaaactggaatttagtcataaattaaggaaatatttccacaggctggaatcttcaaagactatctagatggaagcagttatatgaatacaaaaatttagatcataaaataattctttcgggggcggaagaggaggtgcagtagggaaaggataggatcctgagatgattcagtagtgcctgatattctacagtgacaaaaggctcagtgcttcctctctagctactgtagaattataatttgtgttcaaaatgaatagtcttatgaatcatgagaagaggataaaattcagagcattctctctgggaagcatgcattttaaaaatagacctttttttaagggcagttttaggtttacaggaaaattatgcagaaagttacgcagagttcccacatacccttccccactcagacacaatttctcttaataacatcttgcattagtgtggtccatttgttacagtttatcaacaaatgctgatacattattgttaatgaaagttcatatcttacattaggagtcactctttgtgttctacagttctgtgggttttgaaaaatgcatggtgtcatgtgtccaccattccactatcatacagagtagatatgtcctgtgttccacctattcatccttttcctctcctcttgaatccctggctaccactggtctttttatcatctctatagttttgtcttttcagatgtcgtatagttggaatcttaaagtatgtagctttttcagactggtttctttcacttggcaatatgtacttaagattcctccatgttctttcatagcttgagagtttatttttttcttccctttttttaaaaaaaaaaactttattgagatataattcacataccacacaattcacccatttaaggtgtacagttatatggattttggtgtattacagtataattttttagaattgtaactataacataaaatttgcctttgtaagtgtgcaattcagttgcattaattacattcacagtgttgtgcggccatcaccactatttgtaaaattctttcatcaccccaaacagaaaccccgtaagcattaagcaatagctccccattcccgttccaccaaggccctatctgtctctaaattttcctgttctaggtatctcttataagtggaatcatacagtatttgttattttgtgtcgcttatttcacttaccataatgtcctcagcgttgtcatgttgtaggatgtatcagaactttattccttttatgtctgaataatattctattgtatgtacattacacattttaaaaaatttactcatctgttgatggactcttgggttgtttcttttagctattgcactgaacatgggagtgtaagtatcaagttctggctttcggtttatttgggtgtatacttaggagtggaattgttggatcatatgataagtcagtgtttagctttttgaggagctgctaagtttttccatagtggctgtaccattttacatctccactggcagtttaaaaatgtcccagtttttctgtattcctgccaacacttgttattatccttttttgttgttgttgattatagctatcctactggttgtgaattggtatctcattgtggttttgatttacatttccctaaagactaatgatgctgaacatcttttcatgtcgttgttggcaatttgtatgtcttctttggtgtaacatctattccaatcctttgcccattattaactttttaaaacaactgtttgagtattaaaagttctttatatattctggatacaagacccttatcagaaaggtgatatgcaagtatcttctccgattctgtagattcctttaattttgttggaggtgtcttttgatgcactaaatttttaaattttgaagtgcaatgtatctatttttccccttggttacttgtgctttaggtgtcatatataagaaactatgggctccattgtccaatacaagaacatgaagatttatacctatcttttctaagacatttatagttttagcttgtagattcagatcctgggtcctttttgaattaatttgtgtatgtgctgtgaagtttaacttcattctttttcatgaagatgccctgctaccatttatcgaaaagaccattttttccctgttgagttatattggcatccttgcaaaaatcaatcaaccaaataagatgtatgggcttatttctgtactcccagttgtttcattgatctgtatgtcaggccttatgctagtactgtactgttttgattacagtagctttgtagtaagttttaaaattaaggagtgtgagtctccaacattgttctttcataagcttttttttttttctattctgagtctcttgcattttcatttgaagtttagtaccagcttacgaattttgttaaaaagatggctagggccaggcgcggtgactcacgcctataatcccagccctttgggaggtggaggcaggcagatcacttgaggccaggaggtcaagaccagcctggccaacatggtgaaaccccatctttactaaaaatgccaaaaattagccaggtatggtggcgtgcacttgtaatcccagctacccgggaggctgaggcacgagaattgcttgaacctaggaggtgaaggttgcagtgagccaagatcacaccactgcactccagcctgggcaacagagtgagactctgtctcagaaaaaaaaaagaagatggctagaatttggctagaattttgatgggcttacattgaatctgtagatcaatttggggtatattgtcattttaacaatactaatttctccaatctttgtacacaggatgtctttctttttatttagatcttttttccatttctttcaacagtgctgtgtagttttcagggtacaagtctttcatgtcttaagtttttttcattttaaagattattttccaattaatttcagaagttcttgcatttctgaaagttatttctaagcattttattctttttgaagctctagtaaatggaattgtcttttttttttttttttttttgtgggacagagccttgctctgtcatccaggctggagtgcagtggcatgatctcagccactgcaagctccgcctcccaggttcacgccattctcctgcctcagcctcccgagtagctgggactacaggctggaattgtcttcttaatttcattttcagattgttcatggctggtgtatagaaataaacctgattaaatgatttttgtatattgatctatatactagatcctgtcatatacaaatagtttcacttcttcctctccaatctagattccttggctagaaagaagtgttgagagcagacatcctgtcttgttcctgctctttggaggaaagcttcccgtcatcaagtatgatgttagctatgggttttttcatagatgtcctttatcagggtggggaagttctcttctattcctagttgtcgagtgtttttatcatgaaagaagttgtctttttatgcatttgtaccttttatatgtataagataaggtatacatgaatgtgtttaaattgactatcataaagatctttcagattccctaacaattgatcttagcaccaaaaaagtaagtacaagtacactatgctagactttatgagtactcttgatgatttatgaccaccaagagagcaagaaaaatacaagttagaactgaaatgtcaacagaagcatagtgcattcatttgttgattatggaaggtacattagcaattgattgataacattgtacacattattcactaataaaaattaatgaaaaagagtccattaggggaaaatattatcttttacatatttctctttgtgtattttcttttctttctttcttttttttttttttttttttgagatgaagtcttactctgtcacccaggctggagtgcagtggcgctatctaggctcactgcaacctctgccccaccaggttcaagtgattctcctgcctcagcctcccaagtagctgggactacaggcacctgccaccatgccctgctaattttcgtatttttagtagagacagggtttcaccatcttgggcaggctggtcttgaactcctgacctagtgattcacccacctcagcctcccaaagtgctgggattacaggtgtgagccaccgtgcccagccctctttgtgtattttctaatgaatgtgatatactagaagagtagctcttggcataatttcactcatacttaaataaatgtgcatttattgaggatatatgcatgcacaacaatttgttactgctgaggtgtacagtcaaaatagtttgcaaaccactggctctcaggataaagtcaggccccttaacatgtttccaatctacttttctgctcttatttccctaatcttcaatgtagcacattgcattaacaatcattcctaatatattgtatgcttagacatttctgtgcttatgcttaagatttgtctttccccttggaatatttttttatcgctgtccatgttttgaactcctacttagtctccaaatcctagctcagaatcctttttccctctatccccaactactctttccctcaatgggcagaattaattgctgtagtactttattcataatatcaaagcagtgctttttatggtatattttattgattttatatgtctcattttaactagattgtgagggcatgtaccatatgttaatcatcctttcaccatcaggcctgcacagagtagacagtaaatttttatcaaatggaagtcatagaaaaaaacaagaaagaaaaactgctagataaaaatgattttgttgtctcagagaagaaagaaggcagtgtcaagtctgtactgagaaatgaatgaaagagaaattatttggtccgagtaatctatatctggagtctgccctagttacaggttatcaagagagatgaagacaaaagaagatactatagaaaaaaaggctttcttggctctcttatttggtctttacacttgcgttgcctttgcctggaatgctgttttccagaaacctgcatggctcttccacctcctttggatctcttctcagaaagtcttattagaggccttctaggtctaccctagttataaaaaagcagcctggcctccttgttgtactgatatgccctggccaccttctgtttcgtttttccccatagcgcttctcatctgacatagtgtatattctattttaggatgtgtttattgtctatccctactaaagtgtaaatttcacgacagcagggacattttgccttttatatccgctttgtctatgccccatctccagtatcctcagcagtgcctgtcacatggcacatgctcagtaattaataatagttatactagtaggaaaaacattgggaaaacaaatcagaaaaattgggaaacatcggagaataataagttactttttcaaataatttctcaacgcatttttccttaatctctagacagcttttcaggtgatatatctctgaatttaagcagtgagtctaattgttaatctgaaaaaataaattcatgattttccctgtgtttccagactttggtgatattctatattgtacttattgtagttttaaaagagtcaccagttggatacattgctttaaagttagaggtacttcacaggaaacagtgtctaggctatagaaggacatattgagcatattgtttgaaaatgtaactaacgtagcgtttaaaaataaatttgttctatatttgctaacttttgggctcttttattagcaagcatgtttactgcactttgtaacaagtggcattctcaacacttggcatgtatgaattcatttaatcttcacaacaaccctttgagatgggaaatgttgttggctcctttttgctgatggggaaaccaaggtgcacagaggttgaataactctccacacagctagttagcagagtcaagattgcaatctaagcattttggctccagaatacatgttctcaacaactacagtatattgttgaatgaaggaattaaggatgtgatcctcatcctgatcattctgttcactcctttactccatcctgtcagcatgtgtcatgtttccagctttgaccaaacatttaaccagttacatatagcaggatggaagggactgagactgaactaatactgatcactatcctgggacaagaattcagaaatgtatcctttttattaaaaagttttttaaaaataaacttcgttttttagagcagtttcagattcacagcaaaactgagaggaaaatactgagtgttcccaaataccctcttcccctgtacatgcgtagcctcccccattataaacatccccaaccaaagtggtacatttgttacaatcgatgaacgtacagttatgtatcatttttacccaaagtccatagcttactttaaggtgcactcttggtgttgtacattttataggtttggacaaatgtacaatgacatgtattcatcattataatatcacacagagtggtttcactgccctaaaatttttctgtgctgtgcttattttttcctccctccttcagcccctgcaagcattgatcttttcactgtctccataatttttccttttccaaaatgtcatttagttggaatcatttaacatgtaccctttttaagtaggtttctgtcactgggctggagtgcagtggcattatcagaagtcactgaagccttgaactccttggcttaagcaatcctctcagaggagaatcagcttccagagtagctgggactgtaggtgcacaccaccatgcccagctcattttaaaattttttgtggagacagagtctcactacattgcccaggctggtcttgaatttgtggcctcaagcaatcctcctgtcttggcttcccaaattgttggaattataggcatgagccattgcgcccagcctcatttccttttagcacttaatagtagcccattgttgggatgaatcacagtaaatttatccattcacctactgaacgttaccttgattgcttccaagttttgacaattacaaataaacaactgtatgaagttttttatgtggacaataattttcaactccttggagtaaataccaaggagcatgatgtactcaattgtatggcaagagtgtttagttttataagaaactgccaaactgtcttttaaagtggcagccccattttgcattcccaccagcaataatgagagttcctgatgctctgcatctttaccagcatttggtgttgtcagtgttctggattttggtcatcctaataggtatgtatgtagcatctcttattgttattttagtgtgcatgtctctgatgatgtatgatgtggaggatctttcatatgcttacttgccatctgtatatctttttttttttttttttttttttttttgagacagagtctcactctgtcacccaggctggagtgcagtggtgcaatcttggctcaccgcaagctctgcctcctgggttcccaccattctcctgcctcagcctcccaagtagctgggactacaggtacccaccaccacaccgagctaattttttttattttttagtagagatggggtttcaccatgttagccaggatggtctcgatctcctgacctcgtgatccgcccgcctcagcctcccaaagtgctgggattacaggagtgagccaccgtgcccggcctgtatatcttctttaatgaggtgtctgttaaggttttaggccctttcttaagtcaggttgtttgtttttactgttgagttttaagaattctgtgtatatttcagataacactccttcgtctcatttttttttgcaaatattttctcccagtctgtggctcatattttcattttcttgaccgtgtcttttgcagatcagaaattttaattttaatgaataacactatattgcctcatgggtagtgctagtaccttataataataaaataattctgatttcttcttcctgtcccttgtatcattgctgttacttattttgcttatacataagcatatgtgtaagcatgtataatcaaatacattgttgctattattttattaataaataataagaaagtttttattttcacttattccttttctgatgcagttcatttctttatgcagatctgagtttctgaactttatcattttctgtttctctaaagaatttctttgaatattttttgcaaggtaggttactggccacaaattccctcaatttttgtttggctaaaaagtctttatttctccttcactttcttagttttggtttctgagaagttgaatgtaattcttatctttgttcctctatacgtaaggtgttttttgcctctggtttctttcaggagtatttttttttttttgaaaaaaaaatttccatttatcctgcttaatgttctctgagcttccttgatgtgtggttagtgtataacactaatttggggaaattatcagtgactgtttcacatatttctcctgttactgtgtctctcttctttgttaatttccattacacatatgttacaccttttatagttgtcccatagttcttggatattctgttcttgttattgttgttgtcattcggtttttctctttgcttttcagttttagtggtttctattgagatgtcctccagctcaaagattctttcctcagctgtgtccagtctcccagaaagcctgccaaaggcattcttcatttctgttacaatatttttgatcgctagcatttctttttgattccttcttagaatttctgtctcatgcttacatcacccatctatgctgcatgctgtccacattatctgttagagcccttacatattaatcatagttattttaaattcctagtctaataattctaatatctcggccctatctgcaccgggttttgttacttgttctgtctcctcaaactgtgattttttccttttagtatgtcttatgattttttcttgatagctgggcatgagatacagtaagaggatctcaggtaaataagcctttagtgatgtggcagtaagttaggcttactgatcttccagatcagttaggctctgttaagaccccatcaggttaggctttggttaactagcttctcctaagggcagaacttgttaagaacagagtgctctggaaaattctgaatggttcctttttttccttcccctgctagaagcaccaggggatttttctccagtatttactgcgagaacttggtcgagatccttgaggtaaaacaaaagtgagggaggccctgaagacttcccctggagtttttatctctcagttatagttcaggcttcccgacctcagcacttgtttccttggaggtttctgctccagcaagccatgattctctgtactgtatttgcctgtcagtctcagtgtggggctaagtggtttgccctgtgactacacctctctgacggatccaagaagagttgatttttctgtatgttcagctttttacttgttaggatggagtggcgactccaactttttacattttggatcagaagtcaggtttatccttttttttatccgtttctaagttgtttaggtcaaggatggcaagaagcatgcaccatgtgctctttattgtggctcttgaggctttaaaaatccttcactaatttgaaggtcttgggtggacagctagaaacagttggcaaggctgggtcagtctcttttatcttaggttaagacccattacaatttaggctcaacctcacaggagtgggcaccatagttaccacaggtgattcaaggttcccaagtgatcgtcctgaatctcgttaacattcgcaggtagtctgacattctctcttttatgcctacaatgtctgtatgcctctgtcacagtccatttatgtacacatctttatcccttgcaaaactctgaatttttcaagggcaagaacagtgttcctagcacttagtaccttgccttggggtaggatcactcaatatatatttgatgaatgaatgattaataccttgatatttttatacctttagcaaatttaaagcaattgactttttttagaaagataaaaaatagaaatgtcagagttgactaatacaaaaatttccctttcttcactacaaattactttttaaaatagttttatgctaaccactttattgaaatataatttacatattatgacatacttaaatcttaagtatacagttggatgaatttggatgagtggaaccatcacccatagcacaataaagaacattttaatcacctcatccagttccttcatccctgcttgctttccctcctctccagaggcaactactttttgaatttcttttttttttttttttttttagatgacccgttaattttacttcatcccaacaatgaccttgcagaatctgcgtccctgacgcaaagcaggaagcaaatatttgggcaagaaaataaagtcagttacagatttcacaagtatcttgtacaccagtctgtaatttttaattagaattagctaaaagacgttgtacctttcgcgtgtatgactgagcataacagtgcttaacagtggctttattaagtgaatgcctgaaagtattcaacattaaattcaatttatttcacattaatgtttgcaaatacatcatcaattcttacatatttcaaatcaacttcaagtacagaaggcttcctctcaaataagtctcctgaggtgacataaagactgaaagaagcctatgacttgagtccaagtctctaaccaacaatcaccatatcgtcactggtgaactcatacgtggggacttcaaggttgagagtagcaggacccaatctgatcctgccagatgcatcatagtgtgacccatggcaagggcagtaataaccaccaaaatctcctgcatttgcaatgggtacacaaccaagatgagtgcaaacacctatcaggataacccattcaggtttctttactcgatctagatcatgctgtgggtccctcaactgtgataattcaactgcagcttcctgcttaatttccttctgggttctatgacgtacaaacaggggtttgcctctccatttgaaagccatgttcttgccttctggaatatcggataacttgatttcgattttcgccagggccaacacatcagcagaagcactcatgctggaaacgaactgggtgacggcattcttggcagcatatgcgacacccacagtagttactccagttaccaaataggagaaacctttcctagcctcggtgctttctcttgaagacttcgtactatctaaaacttcaaggcggcggtattcagagaagtcaggcaccttgacgtctgtgtgggaataacaaacagaagcagggacattgaggcccacggaggcgaccaaaggccggcgcacggcctggccgctcagcgactcccggctgaggaagggccgcttcaggtccaacacaggctgctccggggtggcgggcaccgtggcctgcaccaagggccgcagcgcgcccgccaccccgcgggacgtggccgacaggacgggcgcgaacgggcccgagcgggctgcgaccgaccgaatttctttaactgtatagatttgttgcatttgttcttaaaatttatataaatggaagcataccgtatgtgttcttcagtttctggcttctctcaacataatgtttctgagagtcatccatattgttatgtatatcagaatatcatttgtttttattgctgagttgtattcaattgtatgtgcataccacagtttatccatcttttgctgatggataatatttgggatgcttatagctttgagttattgtgaataaaactcttatgaacattcctgtgcgatatgcattcggttctctttggtatatcctgaagagtgaaatttctgggttgtagaaaccattaaatatgactagaaactaaagttttcttaagtgatttcactaccaatatatgagaatttgttgttcacatccttatcaacacttaggaatgttattattttcaatttagccattttgttgggagtataatgttgtttcaatttggttttaatttgcatttccctgaaaagttgttaagtgccttttcatatgatttttgcccacaaggacatcttttgcctgttcaagtattgcctgctcaaatattttgcctatttttaacattttatctttttattattgatttctaggaatttttacatattttggatatgagttctttgtcagatagacatattatagatattttctgccatcctacaagctacaaaaattctgtagcttgtcttttccatttctaatgttgtcttatgatgagtagaagtttgtcattttggatgtgagggcaatctggctggctaggcaggagtccttttccttcctcaccgctgtatgtgtgtctctcctaaagttggattcttggtcaaagaggatgacctttgctgatagaagaggatttttctttggtcaagggtataggagtagctgcactccctttttaggacctccaaacaagctctcaagatctatttgtaggagaacatggggtaaaaatagttttaagttggtaattttcatgaagttcaatctgtttttcttttatggtgatatagtttagctgtgtccccacccatatctcatcgtgaattccatgtcttgtgggagggactctgtgggaggaattgaatcatgggggcaggtcttttgtgtgctgttctcatgatagtgaataagtctcataagatctggtggttttataagggggagtttccctgcacaagctctctttctttgcctgccaccatccacataagatgtgacttgctcttccttgccttctgccatgattgtgaggcctccctagccatgtggaactgtaagtccattaaacctctttcttttgtaaattgccgagtctttgatatgtctttatcagcagtgtgaaagtggactaatacatatggttaatgccttttttaccttgtcagagaaacttgcctatcccaaggaatatgttctatgttttcttccagatatttatagttttaactaggtctgtgatccatctagaattagcttttgtgtatattgtgagatagagttcattcttatctgtatggtatccaattgcttgagaagtattagattttaataatagagtatttccatatgcatgatcttgtttgatctccttaaagcatcttatgaaaaatgaagagcaggtattttctctcttacagagacttggaggcaaagctcagagatattaagttatttaggtaaggttacatatccaatttatggctgaacacaattagaactcatctaaataatatatcctgatatttagtcatatgctattagtatactaaacagcctctcctagttgagtcttaaaaatatccaaatggggtttcactgaaatactagtgtgaacttaattaaaattatctgaaaaatatctaatcaaatatgaaagttttaaaatatcatcaaattatttacacaaattacagtattcttttaaaaccaattcagattctaggaattgtatggattatagatttgtgtgtttttttaattctcaattagctaagtcatgaaactgcaattaattttatttaaataaactatttcatatacacatacacacatacatttcaattaaaggtataattttaaaaacagggccacattttaaagagacagatttcaatgttgttattaaaagttatgttaggctgagtgtggtggctcactcctgtaatcccagcactgtgggaggatttcctgaggtcaggagttcaagaccagcctgggcaacatagtgagaccctgtctctacattaaaaaaaaagaaaaagaaagaaaagaaaattagctaggcatggctgatggggggctgaggtggaaagatagcttgagcccaagagtttgaggttgcagtgagctatgattgtgccactgcactctaccctgtctctaaaaaaaaaaaaaaaagtgattttactagaagtagcattcattggtgatattcttgccattgtagcttttcattttcattttcagtcacctaatttaggaatgaggtgcttcacatttatactaatgaccgatttctgtattagtataatactccccattgtatcctctcccattgtatcctccaacactcagggatgtgctcataccagttgcctacctatttgctcaccagattttgaatatcttagactaagaactaagcctttaagctatagatgagatataaattaaaatatgaaaggcaaatactgtggaagacataatacatttatttatatttacactaggttttgttgggcagtggggggaggttgttttttgagtttagattctcatagaaagagagaaaacatcaagtatttggcccttgaaaaaggtttagacaaagcgggaaccctaggaatagaaggaaaaagcaatgtctgaggtcttccttttcaaggcaattataatgaattgaataaagccaagatatctggaaaaaatacattcaagaaaaataaaataggaaatattttttaaattgctctagatgttgattagccatgtcaaggctataaagccaaataactaaaatttgggggcattaatacactcacagaagggatggatttggggtatatgaggcagttcctagtagtatgatacaggggccaagcattataggaaacattctagcttaaaagtggatcagatttaattttcagactagtgtcagacatcgagagtcagaattctctaatcggtgaacccacctaatatatgatggtggattagattaataaattagtgcaatttcaatgcactcatggttggtgggttaattaacacaggcttctgagttcatttatagcttaagtgagcaaatgtaatttcctgtaacaaatatttttgatgaacaaatagtttcctttaacaaacatatgttacaggctttaggtcatcataagccttgttgttagaagttgtatcattgtgaatttaaaccaaaaacttttatttaaaatagttgaatatttagccttgtgttccttttcaacaaatgtaatcctgttggtaatcatgatagcaagaagcaaagcatgaattcttttaagcttaaatgtgacttttacccagctggctagtcttcccacggagctctttatttattgtactcagatggacgacaaagcacagtaaacaaaaaagggaaagcaaccagtttagccctttcagtgctgtgtcaacagaactattctctcttaaggttctcatcaaatgaaatcactggtaagtatatgctaaggtcagtcaaagaaattaaagccaacctccactttctagtttattagctttatgacttcaggaaagttacttcatcaccctaaaccttacttttctctttggtaaaatggacttaactctgaggatggttgtgaggattagagatatgtctgagagttagtcacatagtaagttacctgtcgatattagttactactatcagctcttgatagattttaacttttattattttcatttcctagaacagatattcatgttcaaataaagctccattcagatactcactaggaaggtccgtatttatttatttatttatttatttatttatttatttatttatttattttagaagatgggctctcactccattgccccggttggagtgtaatggtgtgatcacagctcactgcagcttccaactcctgggctcaagttgtctcctgagtagtggggactacaagtgtttgccaccatgactagctaattttctttctttctttctttttaatgtagagaagggatctctgtatgttgcccaggctggtctcaaactcctggcctcaagtgatcctcccacctcggcctcccaaaatgttagaattacagatatgagccagtagaaaaggaggtcttttctactgttctgtaaagtggtcaccctctacttgtccctagcaccttgtccacgtatacattgtagccctgtcacactgccataattattgattcacacattggcctcccttactaggtttggagggctgaggatactttatttgtatctcagtttcttctctttctgtggtggaagtgggaaatcagcatttgctgacaatggctgatgggccgactgaatggcaagtatgctattataaacccaaagaaggaatttgtaggtttaatattttctctttatcctaaatattcttctatttttctgaagtgtttctggtatagatttatttttatttatcttacttcgtctttggagatcatttttgacatgaaaatttatgtcttttctgtaaaattctcaactcttgtctctgaatattgctttttttctattaccttaattttcttttgaaacttcctctagacgaatattagggcctataatctgttctttatgacttttaattaatctttttaatcttgttgcctctctgtgctgtattttgggagaattccttagtactgttctcctgttggctggacacggtggctcatacctgtaatcccatcactttgggaggtcaaggcaggtggatcacttgaggccaggagttgaagaccagcctggccgacatggcaaagatattaaacatacaaaaattagccaggcctggtggtgtctgcctgtaatcccagccactcgggaggctgaggcatgagaattgcttgaacccaggaggcggagtttgcagtgagctgagattgtgccactacactccagcctaggtggcaggttgagacattgagactgtctcaaaaataaataaataaataaataaataaataaataaataaataaagtactgttctccaattaccaaatctatcttcagctgttctagtctggtttttaccttggatgttgaatttttttaaaaaaatctcaatgactgtagttttcatttctaggattttaattgatttttttcatatccatctgttcctgtttcatatctgcctttgttttgttttatacttttatattccttgttgtcaatatgagtcatgtattaatctctttatttaaaaatctttgttagagggttttcaaatcatagaatatagattccatagaagatcctatagaaacattgatttcatttggtgtggatttatattgtgattgctggttttttttttttttttacaattttaacttttattttagattcaaggggtacatgtgcaggtttgttacctggatacactgtgtgatgctgaggtttggggtatgattgatcccatcacccgtgtactaatcatagtactcaatagtgcatttttcagcccttgcctcccttctctcctcccacttccagtagtcctgtttctggtgttgccatctttatgtctatgggtacccaatgtttagctcccattctcccatttataagtgagaacatccagtatttggttttctgttcctgcatgaatttgcttaggataatggcctccagctgcacccatgttgctgcaaaggacatgatttcattcttttttatggctgcatagtatttcgtggtatatgtaccacactctcttcattcaatccaccattgatgggcacctagattgattccacgtctttgctattgtgaacagtgctgcagtgaacatacaagtgcatgtgtatttttggcagaattatgtatttccttttggatatatacctagtaatgggattgctgggttgaatccagttctcagttatttgagaaatctccagactgttttctaccatggttgaacgaatttacattcccaccagtagtatacaagtgtccccttttctccacagccttaccagcatctgttgttttttggctttttgataatagccattctgactggtgtgagatggtatctcattgtggttttgctttgcatttctctgatggttagtgatgtggagcattttttctgtgtgttttttggccaattgtatgtcttttgagaagtatctgtgcatgttttgcccattttttagttgggttatttgttttttgcttgtttaattgtttaagttccttatagattctgaatatcagacctttgtcagatgcatagtttatgaatattttctcccattctataggctgtctctttacactgatagtttcttttgttgtgcagaagctcgttagctgaattaggtgccactggtcaatttttgggttttattgcagttgcttttgaggacttactcataaattatttcccaagttcaatgtccagcgtggtgttttctagcttttcttctgggattcttatagtttgaggtcttacatagattgctgatttcattggctgactttcttagcgttagattttaaaaatgtgtattttagaattttagtgtttaggctattttgagtgggagattttttcccacaaccactcatgttcatttccttcctttttttttttttttttaataaaataaaggtttctccagttccctctacccaggtcttctagactccctcctgtacaggccttataaagttggcttggggcacatgccctgtgataatactagaatgtcctagacccaggggctgagcaagcaggtggcttcatttagttccaagtattaagactgcatgtgtatcctcctgcttttagatccacagccacaaataagttgtatcccgggaagcagttgatggctattttttttttttcttctccttttcttcccaggcttctctcacaaacactgcccccataacattaaagagtgagaccagctgtggtttcctaacacctgaggagctgaactctgggctgacagatcaagagcccagcagcccttggcttcagcctcgctcactgctttttcatttctgttatatttctgcttcgtgggggtttttatcttgtttttgagactggcagtgtctattattgctgtgtatttggaatagaacagggggatactttgaagcatgaacttactgtgtcaacttgactggagggattttttttttgagacggagttgtgctctcatcgcccaggctggagtgcaatggcgcgatctcggctcactgcaaccaactgaaggttttctatcctggaaacttgatcagatattttagatacttctcccctccctttctacccccaccgcgttacctgaaggcattgtggagggtagattggaagggagactaaagctaagtaagtaatttaggacaccacaggcaacaaatgatcaaggtctgaatcaagatgaagaggagagaatggatttggaagataattagtgggtatagtcaatagacgtggataactgaatttgggaggtatatgttcatatttctaacttagagtagagataaaagtcaccgagaaaggaatatgggaagaagagtagattttggtagggcagtaggtcaggaatagagacaggagtattaagatttttacgattgtttgaagcctagcacgtgttttagtataaagatcttctgatacatatttttcctagtggtgcatctcaatgccaaagatctttgaatttaccatatttgcaatctctttacacgatggtcagctgtaaatgtatatagatttctcgggccgggcgcggtggctcacgcctgtaatcccagcactttgggaggctgaggtgggtggatcgtgaggtcaggagatcaagaccatcctggctaacacggtgaaaccccgtctctactaaaaatgcaaaaaaattagccgggcctggtggcgggcgcctgtagtcccagctactccggaggctgaggcaggagaatcgcttgaacccaggaggcagagctggcggtgggccgagatcgtgccactgcattccagcctgggcaacagagcgagactccgtctcaaaaaaaaaaaagtatgtagatttctcctcagcatttggaaaacttttcctcagcatattcattcatttcataaacttttcttaagtgtctcttaaacaagcatagtctggacttcgtggatgtcacagttaattggagggaaaagacagttaccaaatgggcaatgactaactgtggaagtgctgtgaaggacaagggtaaggtactgtgacagtgtttgaaagcagggcctggccaagtcagaggcccatgtctgcatagggcacagcgggagagggtgttcactgtccgtggaaggctttcctgaagaaattggagctgttccctgtctggcgcactctgccctaatgtctgtgcagagctggctgcttcttactattcaagactcagccatgttacctcttctgcaagactttccgtgaccacacccaaaattaaagtctggcacatcacccttctttatttcctttagagcatttatctgaaattatcttgtttatgattattggctgtttcaaccaactacaatgtaagtgtcacaagtgcagggaccttgtctttttctgacttgcacccccattgcttagaatacttcctgaaacataagtattccagaaattattaatggactgcataaatgaatgtccttgggccttgatctcttgcatagttgctctactaatttgatttccttgtcctttttttgtttgtttgggaggactcctcaagttggctgtctacttgttcatttttctgtcacctggaccctaccctcacgcccccgttgtgctctaactgaggttgccaatcgtggcatcacaccctatggccatggtgatgggcatgtgactgtttcaagctgggtcacttggagtccttctcctgatactccaaatttgaagagggagacttctcaggtggcagtgtgaatctagagctgttggtggccataaccatccagataaaagaagccaacttgcaagaagagaaaatgcaagcatttcctagagaagcagagatggcaggggagagatgtcctggtagttttccagtcttggcttcctttgtacctgaggctcagttgcaacccctggttttccctagcttttgcattacccagttcaaatggagtttctgtcacttagagccaaaagattcccaattaaaactgtatatagctttattttcactttaacctgcacctcatctaacaacctttttatcttgatgtgttttatgtaatatccttgggtattgatctgttggactagtttaatttctgatttcagagaatccatgttttctacttccaactccatttcttaattttgctgcctaagttttctacttccagtactattctttgttggtatgctgtcctccctttcttttcagaaacatattgtttagtagtaagaaggtgctaattattactgttgttgttatttaactcatccttgaagcaggtttattacgttcttcttagattttctcactttcaactttgatgcttttgaacagccaggctagtatctagtatctctagtaccttctctaggatgatagcaagctagggtagtgggcagaagctcacttctgggtgatttattccctatgtttggtgaactgctgtggcctgatcttcctggtgctgctgagtcctacctcagggaggggctctgatgatctggggagaagtcctccactattgcaactggctctttgcttggtgtaattgcttgtctcttagaactattgcagctgtcctcaaatcccaccaatccacacagactccaaggagaatatttcatatctattctataatttctagttctaacttaatgagagcagtgttacaagaaattatttcaggccaagcaactgtcttaggcagctaagttgtaaattgacttagtatttttcatcaatctggttccagttacactatgtcaagaagaaaattagcagctttttggtaatttattcctttatgattaattcactcggtaaattttttgttttgtttttgaaactgagtctcacgctgtcacccaggctggagtgctgtggcccaatctcagctcactgcaacctctgcctcctgggttcaagcgattatcatccctcagccacctgagtagttgggattacaggtgtgcaccaccgtgcccagctaacttttgtgtttgtagtagagacagggtttcaccatgttgcccaggctggtctcaaactcctggcctcaagtgatctatccaccttggtcactcagtaaatatttactgagcatctactgtgtgccagtcactcttgcagacactgaagatatcagtgtctaaaatgagacttctctgcccctcatggagcttatatttttggtgaggaaacaaacaataaataagtaaaccaataaatatataatattaggtaatgataaatgcgaatgtgaaaaataaagcaggataaaggaatagagagtgatgagggtggggctattttagaaagggtaggcagaagggagattctctgaggaggtgacacttgagacctgaatgaatcagggatagagccacacaaagagttcctggcagaagcaacagccaaaacatggctctaagtagatgaagagcttggtgggattgcagaataaagcaccagggtagctagagtagaaggaatgagggggaaggtggaaggagatgagttcctgatgttaaaaatgggaaaacatgttctttgtgcctccaaaaccaatctttgtccatttttcaggggaaagataagtgtctgacatattgttcccaaaggctaaaattcacagccgacttctgtttatcacacgacactgaatggttacccaaaacattgtggaaattcgggttatggaatgcaaactgatcataggaagctaagagtgtttagaatgatatgatttgaagcagttataaagtagatttggaaggaagaaataactaagaagtgagattagataaaataatcttggaaaagatggcaacttgagcaaaggttgctgacactgtccacaccagtccttaatgaagtgacccgcagtgagagaacatcgttggccactgtcatctaaatataccccaaatttgaccatttctcatcacttccactgctagtaaattatagttagaaaacattaatactttaattcatcacacctagagcccaaaatgaacatacaagtggatcattagggacttttcagtttatttttgaaaggtggcttgggaagccatgtttgtgagttcatcccaagatggagaaaggtaagtgatttcctttatcgtttttctaggaagaaggttgaaaaaatagtaataccttatattcgagtgagttataggttacagtgtacctttgtatctgggaattcaaccatacagatactgcttgtgctgcttttcagatagaagactcaggcccagatagaccacctgactgactgaaagtcacacagatggttaaggacagagctatcactctcactagaattcttgtctttgactgtgctctgtcactctgttaaaaagcagcaaattgttttgataggatgttacgtcagagaaaagccaattgctctcccttttcttgtcccaccccaactgtacccctgtaaggtaacagatgttaacaatattctgagtatgccatctgtttgcctgcctgcctgccttcctatattcttgcctgtctgtctatctgtcttagtctgcttgtgctgctataacagagtatcacagactgggtaatttagaaagaagagaaatttattttctcatggttctggaggctggagagtccaggttcagggcactggcaggttcagttgtctagtgagggctgctgtctgcttccaagatggcgccttgatgctgcatcctctggaagggaggaatgctgtgtcctcatgtgacagaaggtccgaaaggcgatggtggaaggcaagcaagagacaaatgctgtgggaagcctcttttataaggacctttagtctgttcacaaaggaggtgacctcatggcataatcacctcttaaaggctccacctcttaatgctatcacattggcagtacttgaattttggaggggatacattcaaaccacagttgtatgtatttctttatctgcttctctcttccgtgtacatatatggtgatttcttttcctctatatgttacagcttcaaatcctattgtgtatgttactctaaatctttaaccatgtgtcctggtcatacatctaggtcagtatatctagatctaattcataccccttctttgtatgcctatattgtttgattattgcaaagtattattgctttttctttctttttttttttttttttgagacagagtctcgctctcttgccaagctggagtgcagtggtgcaatctcagctcactgcaacctctacctcttgagttcaagtgattcccctgtctcagcttcctgagtagctgggactacaggcacatgccaccatgcccagctagttttttgtattttagtagagacaaggtttcaccatattggccaggatggtcttgatttcctgacctcgtgatctgcccacttcagcctcccaaagtgctgagattacagccatgagccaccgcacccagccatatattgcttttaaaaggaaaatccaataatgtatttaaagtgaaaaatgtaatgccagtatataattttatcatatattaatgacttatttaccttttaaagtataagaaaaggaatatacttatcagtagttctttatttgctgcaggttttttcactgctgagatttttatttttaaaaaaatttctgtagaaaaaaaattaattatagccttaactagtatttccttttctaagcagagtcaatgtatttttcaggttattatatccgggaaaaatctaagcaagtcatcacattgctgatggatgaac

SEQ ID NO: 143 - DNA, 658 bp, Homo sapiens
aagtggggaccggcctgggcccttgagcctggctggagtaggtggaatatcctggggagaggaagtttggtcgttgggcagcggccgactttcctctcaggaaattgatactttatcaacatagagattaattatttgtatttgggagcagcagaactggggaccaattacctgtcaagagttttataaacccgtgacataaactgttattccattgctttcatcctccatctcaccttggaacttgtattacttatggcgttcaggagacaagtgaaaaactttgtgaaaaattactcagatgctgaaataaaagtcagggaagcaacttctaacgacccttggggtccctctagttctctgatgttagatatcagtgacttgactttcaacacaatttctctctcagagattatgaatatgctgtggcacagactcaatgaccatgggaagaactggcgccacgtgtataaatcccttaccctaatggattatctcatcaagaatggatcaaagaaagttattcagcattgcagagaggggttctgtaaccttcaaacactaaaagattttcagcacatagatgaagctggaaaagaccaaggttattatatccgggaaaaatctaagcaagtcatcacattgctgatggatgaac

SEQ ID NO: 144 - protein, 135 aa, Homo sapiens
  VARIANT (1)...(135): Xaa = Any Amino Acid
MAFRRQVKNFVKNYSDAEIKVREATSNDPWGPSSSLMLDISDLTFNTISLSEIMNMLWHRLNDHGKNWRHVYKSLTLMDYLIKNGSKKVIQHCREGFCNLQTLKDFQHIDEAGKDQGYYIREKSKQVITLLMDEX

SEQ ID NO: 145 - DNA, 79640 bp, Mus musculus
cctcctccgggcgggataattgaacgcggcgcgcaggagcctcgcgttggctgcccaggcctggctcgagcgtgtagccgctgcccgccgtgcctttgtccgccgccggagcccgccagccccatggagcgccccgtgccgtcgcgcctcgtcccgctgccgctgctgctgctcagcagcctctcgctgctggcagcccgaggtaggggagccccgggcccacggccccgcactaggtccccacccaggccccaagctccctggaagtttgcagcccccgatgctccggagcgcgcgctgcacccaggggtcatcgcacggtccccagagctgcgtggaatccaggcccacgaccccccccccccaatacttccggctcggctccaatgccctcctcactagggggacttgctttaaatctttaaccttccaaacagatcctcctgcgggttcacgaagccgggtcctctgttggtgaaggcagatcgcctgctgggccgtgggggtgggaagtgctctgtactggaagtaactttagtgcatcttttaaaccgcctccaacccctaccctcgggggtgggggtgggaggtgggtgcgggaggaactactgcacccattttgcccctgaacaaactgagacaggaagacagagatgggggcagaaagaaaacagaaaatagagaaacatcccagaggtttgggagctggccacctcttccctgctggttcaccgtagtagcagattagtggcccagaatcacgtccccagtacaggaaacttagaatggagtagggtccacctaggctgtacttttctcagtccaaaagctgcaaggcctgacgcaagcactttacctgtctatcagagaagcaatggggttgtaaatctatgacctttaacctcttgtgattaaggggttctcagagccaagcctggccctcctggagtctttgtttctgcagggggccctagatccacaccaccttcttgatctcttattctttattcctgggttagcttagtttcttttgaactctctgacccttttagtcaaaaggtcactggttgtgataactaacgactgggaggagtcttagagagaggcagaggggagggagaaggggctggctggtcctgaatcctggaggagttctggctgttccgggcactggctacagccttggcacatcttgggtcacttctcagtgtaggagacagggtgggtaggctcataggcctgagttggtgccaagagctttgcagcccctcagagttcagggaggcttcttggagcagattgtgtgcttggaccagagatggtgaggtgggtctgtgggccaaagaaggcatttgaatccctgccagggagagtgaaaaccagagaggacttttaataagggaggaggcacacccgttgcaaatggcagggacctctgatacccccatattgctgcagaaaggagacaggtggaaagatgtggtactcagagtcgtgtctcctagagtcactcaggcccattttgtggcttgtaggggaagctgccttgagtttggttagttcagtttggtatgatcttagaaaagggtttgaagctgcttggtcccttcctgcagcctgtagcaaggccaggagaccctgatctcaggccccagagagctgtggggtgggcgagaaagctgacatctaaaaaggaccttagggaagccagcccagcagagtaccctgttggccattcacttgtcccccattggctgtgtatatatttgtatatatatgcagaagagccctgatttttttcttgctaagggacagagtcagcccatgactgtcctgtgactatctgtcctgttgggcttggctgcctcaggaccagctgagggtgtagggagcagacggggtgtaggggggtggggaggtgttgggagaaacagttgtgttttctccaaggctttcttggcctctggctccagcttgcagtttccgactgattaaaagaaaagtcctgttgggagggagaacaaaggccctgagcccttggcagaaacatgtggctgtgagctgagctcctggaactttcccagtcaggaggtggagactggaggcaggaagatggggctgggggttgggagaacccctgggggtggggggcgcagcactgagacctccagggcttaaagttatgaattctagagttgcagtttttgtgttggtgtgtctgtgcccactccaccctccaaccccctcccacggtgaaggggagaagtcccactgtgaaggtgagaagtctgctccctgctccccagctcgctcatcagattacccgggtacctagtgctttggaaaccagttttcctatctggagaaaaatccagtggaatggctgggcggttcccagtttgtaaaacacgataacagattcccgcttgttaggttgctttaagggttaaggaagagagctaagcagctggagagccctttttgtccatgcttcggaacttcaaactcttcctgaaggagccccaaacaggcagccctggtggtgaagggcatgcagaagccttcactaaataggcactgagggacagcacagcgccagatgctgaggtttcccggatgtggcaagggatgagacagattcaccctttcccttcgtgtggttcgtagcttccaggagatcagataaacaagccaagccttaatggttgggtcgggggagactttctggaggaggcaatgtgcacccgtggtgtttatctcaatgtttgctgggggtggggtgggggtagggggaggtggggggggggagtgtgcatttctggcaggagaaagagcctgagcaaagtcctgttggcaaaagataacttgcgcgtcttagtcatttttcaattgccatgaaaaaacactatgaccaaggcaaattataaaagaaaacatttaccttggggatcaaggtttcagagagttaaagagtccatggtaatggtgtggagtatgatggcaggcaggcacggtgctggagatatagctgagagcttccttttaatccacaagcaggaggaggtagggggtgaggagggaagggagagggagccagagagagctaactgggaatggtatggacttttaaaacttcaaagcccactactcccagtgacacacctccaacaaggccacacctcctaatccaccaactggggaccaagtattcaaatatatgaatctatgagggccattctcattcaaaccaccacaatgagataaccaggaacatataggggctctctgccctacccttgtgcttggggaagccactccttgaaggtccagtaacccaggcaaaaggcataatggacagccatctttgcaggtaacactttgggcaacagttcccaaaaggcacatgagattttaccaatgcactttgttttttaggtttgtttatttttaactttgatctgtgtaagagttttgcctgcatgtatgtgcaccatgtatgtgcagtacctgggacgaccagaagagggcatcagattcttcctggtactggagttccagataggtgttagctgccacgtgggttctgggaactaaactcacattctgggcaagaactcccaatgcttttatcttctaagccatctttccagcccggaacccccatcccagtgtattctatcctacaaaagactttccttttgtgaaatatcacattgtagcaatttgattaatagctgctttgacatagtgtgtgtgtgggtccaatttctttgaaatgatctcagctatggctgtgtaacaaaacaggatgggagaaaaggaactttttcaaaatcccggtaaggcatctgccccacttagggcaagcagaggtgctgtttcctaagctggacaggcctcacctcctttcaccccaggctggtcctgagtaaggtggggtcagtgatggagctggtgggtgtaactccagcggtctgtgtgtttccagggggtgtatttgggcgatctcaccccaaaagagggtagggggaagctagactcggttttgaaagtggctcaagatggtaagtggcccaagcctctatttctcgatgtcagtcaacttcactggttaatgctgttctgggccattaggctaacggaagtgactcccatccaagagctgacagccctgtgaggtatgtgacccagtatttttcctgggtctctttttactttcagtcttctcacctactggagttaagacagactgagttttgctacatgtgtgaagtcttgcctttccttttgacttgaaaattctcttgggaaactccatcactaagagtcagtactgcctgtagtttgactgagagtggctgtgggatactactatcccttgacagaatggatgcaggacactagccctggaccctgcttcacctagaggacctggtagcatgcatgccacatacctcctcacagaggactctgtcattttccccattgtacaggaggacaataaggcacacagagattaggggtcccaggccgaacaaggatgcccggtggcctcatatcttaccagttaactcttcactttcttaattccagcatcagtgagggatacggctttccccggggcttttatagtggatctgggagctttagaagctgagctgggttgagggccagtcaacctttgctctttctgcctgaatctctttagggtccctatgcagttgctagggtctcaggagatcatttgctttttcggcgtggttgcaaagcactggaagaaagtacagagtgaaacaccgcccagccccaccctccaggtgttaagttcaagtgtaatcatttgtgctcggtgctgggaattgtaagagaacaaagaggcggtgcgagacaggaaacaattcttctgtgagcctgcgtgttggagcgagtcgagggtggttaggagtccctgaaggaagggctgttggcaggagcacattgacctaggaccacccggctgcaacttctaaaggccaggtgtgtgaggacacgtgacaggtggccggagaagtgaaggaagccaggggggagatggtttgaggagcagggtgggatgctacggaagggtcggcggtgaggatggcactgggtgtgctagacttggcacagaagatagctgcctgagctggacctgctccagggcgcgtcaaggggaagataactcgccttcctaacagtgccctgctcctcatcttcctctgccccctcctggctgcttctccatacctcagacccttgtgcggtctgggacacgttctgggcatgcgcattccgttctgttggctttattgtcggggtcggcagttttggcttctttaatcccggtcccaagtccctgcagggtcccctcattctgctgtagctttagagaaggtagtgactgaggccatgggcaggatccttgcaaggtgtgtgctatggaggctccaggcagcaggccaggattccacccattatggaacaccagggccattctctgagggtctgagcttgtttcgaaactcgggggtggggtcaatggaggctagcctcactattggtccttcctcaaccccacctactctgtagaacaagaggacatttaacatccagagttttgtaaggaccgcctaagaagaaaaatgtttttggtaggatggctcttgaggcagcgcccttgctttccctgtgaatctagcagcctaaggcccatgcatgcgcaggcagaggtggggaggggcaagtccgacagtaggggaaactgagactcaggcctactacagtgggaaaatcttctacttaacacactgagaaaccttagacattaattagatcttggtggcccccagactgacactcggaaagcctctacctgaagagtggtaccgaaccccttaatcccaagcccggtgtctatacagtcatgggaggacctagtgaccttggtgttacatatcagggtggggtctgctgtttctctctggaagccatgaacgagcgtgtgcagggacacatgtttccctggtgtcccgtaatgggtgggaccctgggcctgttccctggagcctgcatagctcacacactgcatgtattgtgctgtttgtagctgtcagttttatgacttttacttagttacttatgggtgtatgctgatgtccatgtgtggaggccagaggttaacctccagggttgttccttaggagctgtcggccatgctttttaatataattagtgtgtgtatgtgtgtgtgtgtctgtctgtctgtctgccctcagaggccaaaagagggtgtgggatcccctggaaccggagttacctgggtgctgggaaccgaactcaggtcccctggaagagcagcaagtgctcttcactgctgggtcatctctgcagccctgctttgcttttgagatgaggcctttcactgggacctgaggttcaccagcattaggctaggctggctagcaagttccagtaatccttctgcctccgcctccccagtaccgggattacaaatgcatgggtactgtgttcagccttctatgtgggttctgggcctccagctgaggtccgtccactttcacggaaagcactgactaagctgtctcccggccccttggaagtgtgaactcacctggaagaaagttaccctgggggctggagagatggctcagtggttaagagcaccgactgctcttccaaaggtcctgagttcaaatcccagcaaccacaatggtggcacacaaccacccctaatgagatctgacgccctcttctggggtgtctgaagacagctacagtgtacttacatataataaataaataaatcttaaaaaaaattttaccctgatgccatctgcccgactgccacagtagttctatgggtcagtggcattctctgaaagagggatctgggccaggtggtgggtaggtgctgaggaatatgcagttcctatagaataactgtggattctgtttcatcctgtagtcctgtctccggtgttacctccttcacctccccatttctgcacatttgattgtggaatagatatccccgaggtttggagagatatggcagcttgtttgaggctgagcaatgttaccttctgtttggtgacatctctatatgctgcactagctgtccccatctcctggacagttacagactgttgtatgtcacctgggtgttggaatcaccaaatgctcttagtgcctgagccatctctccagccccataggagatcgctcttttttgcttatttgtttgtttgtttgagactgggcttttctatgtagccctggctgtcccaggactctctcagtctctctgtagaccaggctggcctcaaattcacagagacccgcctgcctctgcctccccagtgctgggactaaaggtgagcaccactgcccctgacacagggtgcataacagatatttacattatgattcgtaacagtagcaaattacagttatgaagtagcaacttagtaattttatggttgggagacaccacagcctgtggaacaaatgaagggttgcagctttaggcaggttgccagcctgtggattctttgactgaagggcagccatattgggcaagagagtttattcttggtttatgctcttaattgcttgaggatcttgtcgcccagtcagatgacagagttagaagttaaaagtagttaggtggtgtttctatagacaagcaaccaggactgaagtgagagaaggttctgggttggctgaaggggccctgctcagtgaagggacctcgaagctctcggggtgtgggtcagttaattgacagacttggaagctgccgctataggctggtggcacaggagcggcagtgataacctggaagcagaatagaacgacagagcttgcagggacacaggaagtagaggagccccacactctggaatatgattgaagccacttgtcagctgagaagcaggaatcccagccaatattcggttcatttacagatactttgtatcagtgggttctcaacctgggggtcgcaacccctttgggagtagcaatttagtaattttatggttggggggggggggaatcaccacaacctgaggagctattgaagggtctcagcattagggaggttgagaaccactgctctatattaaagtgagtgaaccaaggttgggcctgggacttttaagcacagtgagtgtgtttatggtatagctctcctacatacctgtgggctagagttttctatttaatataacaattgtgatcctgtcagatagcccgagggtaattatttaggtttcatagtaagcctttggagagagtaacttcaaaacctaaaaaaaaaaaagatgtatctgactttcagaaatcaatgctctccctcggggagtccacacccacacttgggtttgttttctgttccaagactctccgtagagaaggccaaacccaagtgcttggtgtcttatctttctatctgagcacctttcctcttaatcctcctacttaagccgggttttggttgttgttgttgttttaaatactcttattaaattttaaatactcttattaaacctcaactctggccagtcttgaaattcttttccgcatggcatcaaagccacgatcaacccaggtttggtttgagttcaggtccctaaatgctgcaggcatcagtggggaggtgtgccttctccctgtccccaccaaatgctgacattgtgatgggctctgagtcactcttctcagtgctgcaggtgtgtgtgctggttggggtggtcaaccttcacctttctgaaggtgtcaccagtgggcctgtgaccgaccagctgtgacagaccagctgtggtatggaactctcagcacctgtgaaatgtggactgggtggggactttgctcggtaacttactggtagacactaagagaggttgctctgggtgtaatgggagtgagccatggggtgaaggaaggactgtatctctgtgggcttcgggaagtctgcaaattttgtgtccggatggtaggacccaggatgccagtgttcaaggtgacttgatcattcccgatccccaggtgagtctgcgggaactgcacctgcatgaggaggaggtcttaggtcatagttgaggccccctcctcactgccctgctctaagtgagggtgccatgaacctacccacttggaccactctgtggctagaaagaaaagtttatttgggaaagcaagttcccggctgtctcactgggatagagcgagcagcggcttgctgggaaggcaaatgaattttacatgctagtcagccaggttgtggtctttgagtcgataaaggctgtttagattaaccgggaactcgatgcccttgcccagtgtagttggcctttggggctgataaaggagatagtttttttgtttttgttttcagtaaagagaaaactgcttacaaggttcccgaggaatgccgagtgtgagcttctgtttacccagtaataatcctcctgtttacccagtcagagtccttctgtttaggaccttgtcaccagcaccgccatttcggggccctgctttggatcttaatacctcccgcatggctaccttagagacacttgggggaagacactccccagggaggtttttcaaaataagttatttgaattatttctctttgttaccacacagtttaactcttcctatttggaatctcacagctcaccatgcgaatcatgtcattgtctacacagctgctcttaagaacactcccaagtgcagttgactaaattcatctcttcatggtagtcagaccagcactggcggaaaaagaccaacaagtttacgggcaaaatgttcagttcctttcctagtgacagagaaggtggaaggactcgcaaaaatgattctgatttattttattttggggccggcaggacctcactatggggtccgagctagaagtctggttaccgcagcttcccaaactagggtttataggaagggaccactgttatacacctaaacactgtgttaaaaaaataataaaacaaaacattctcactatgtaaccctggctggcctggaactcgtagagatccacctgcctctacttcctgaatactgggattaaaggtgtgtgccgccaccagacttgttgaaaacgctaagtttttaaaaggtttatttgtactgaggtgtatgactctttggtctgtatttctgtaggtgtatcacatgcatgtagtgcccaaagaggccactggaggcatcatgtcatagggtttactgctgtgaacagataccatgaccacggcaagtcttataaaggacagcatttaattggggctggcttacaggttcagaggttcagtccattatcagtaaggcacgcgtatggtggcatccaggcaggcatggtgcaggcagaactgagagttttcatctgaaggctgctagtagaacactgacttccaggcagctagtggtagagtcatatagcccacacccacagtaacaacacacccactccataaaggccacacctcttaatagagccactcccttggccaagcaaatacaaactatcacttatcagatccctttgaactccagttagagacaggtgtgagctgccctgtgggtgctgggaaccaaacctaggcgctctgtgaaagtggtaatggctcttaactgctgagtcatccttctggcccctaaacactgtttgtttgttagtttgttagttagtttgtttaaacactagtttgtattttttaatgaatgttttcattgtggtgaaatgtatatcacactctttactatcaggtgtgtaccctccagatcccataaaagaagtcactgctgtgtatacgtctctaccatttatctctagaatgttctcattttcccacacggaaatttcatacttattaaatcttaatttcccacccaacccccagcccctgacaagcacttgttcactgcctataatttttttatttacattttttaaaatgggaggggggcagcctgtgtatgagcataggtggaggccaggggatggagagtgggttctcctgctaagcgagtctcagggatcgaaccctggtcttcaggtttggcggcagtcacctttacactgaatcatctgctggctttgtgtatggatctgacttttagggacccgtgttcccgtgtcttgagctctctgactatattttgatttttcataaggcgagtatagcttgtttatctaaaaaaaaaaaaaagtgaacatagtcattgtgaatacagtaatctccctttctaactaggatgagagaaagtgtgtgtgtgagtgtgcgtgtgtccttgtccctgctgtgtgtgtttgtgtgctgaagtcagcttggccctgccctatagaacctgtcttgcctggggcatacacaccttttaaagactaacctatagagggagcctttgttagcatcttgggctgtggttaccagggatgtgttctcatttctccaacccctcctcttccacagctctgccttctttagtggataagaggcgggtagtgccctgagcccaccagtggaaagtaagacccatctccagggatcagaagcggcagctctagactctggctcgtgttgaacttctagcgagtcttgccctttgctgtgctcaactccagccgaggaaccttccttctggtcactccctccactccctgagaagaaccaggaagaagccctcatttgaaaggcagagcattctgccccaaacatcctctgtggtttaggggtggccatgcccagcagttcctcgttctttggaattaatgcttcttgagcctaggtcgggatgctggccaatacagacgcagtgtggacatcaaaggggggggggatgcttctttgtccatgacataagtccagtgccagggagcaggagggtgcagggcctcagtgtctgtcgagtcctgggcagagctggccatgtgctgctttaggttggtgaagcatagccttggtgtggatgggagacacagcattgtttctgttagtggtgacttgactcgattcagattcagttcctagctctgtttgaagtctgaagtccttccttgctatgaccctttggtggctgagcccttcaggtatctgaaagagactgatgactatggaaacagttggggaactgttgttggggacagaaatagggaaaaccctggcggacttctgataactgcagggtggtggctccagaagcaggtgtgcccatgcctgctttcttcactgcccttgtgtacatccccagatgctgtaagcccttctagactggcatgggtcctcctggactcctttcctgttgggctggagctcccagaacatccttagacagacaactccaccttgatgaaggagcctgtgagcttgggccagcacatgcagctccagctgttgacacagacccctgcttggcaatccctgtggcctccctagttagctacagtgctgggcttatagagtgatgttcaggcattggtctgctctgtgcacctagcgggactctgaaaatgttgctgtccccagcctggctcctctccttcccaggctgtagcctgagcaagtgattatcacttagaataagatttctaaatcctcacgttgtgctcaaatgttctgctgggtctgggtattccttcctgagagagaaaggttagaagtaatgcattcccggcagggtgaagctcagagcttcaggggacaggatctggggactgagtgggatcttgggcttgtttattgccaaaaggctactcctctggcctttgtccagcctggctgtggtccctgcctggtctcttaagggggcattgcaagcactgtccactgacttatgagacatctcaggcccaaggacggtgagctgatcccttgaagcctcaggggaggcactgacagctctcagacagctctgctctgcaggtatcaggcctgggacactctgcttaggaacagtggagccacattccagggacattccaagtttccagactgcctgaaagttttaacatctgattgtcccgctgagcgcacatggttcagggtgtccaaggtcctctaacaggattccttttaaaacacactagatggcccccatgcagctcaggactcagttcccacccacccacttagagtgcagccttgctaatggaattctgcacacagaactggcagagcctcccctctctcaggtgacagcaggcatcccttccatcctctaacaagtggcaaaaccactgtttagaacttcatcaacctgctccaccctctcagagactgcagaggttaaaatgagctctgtgttaatacaaatgggccagagggctgaagtggccatgccagggtcacaaagggaccgaaggttccaacactagagccagagttttaatggctccaaagctgtgcccttctccccagtcttgcttttgggttttttgtctgtgtgtttgtttgttttcctggagagcggtttgctatgtatcccagaacagtcttgaacccagacttgcagaaactctcctgcctcagcctcctagctcatcatttcaactctttgcttccatgacaggtttggctaaagtataaggggacaagggacagactcagtgtcaggatctctgcttggaagagtgtgtcagataagtggaacatcaggaccagagagatgagcccagagtgaagggttctaagatgggagcccagggccctaagactgccgggaggcgacagacagtgtgagggagaggctgggtctggagaagagcttaaggagtctaatcacattggtgatgttgtatgagtttgtgtgtgtgtcagatgtgttttgggggcttggggctacatggagaaactatggggacacactacaccacttatctagggattaaaccactctttggaacagtcgggaccatgttttgtgtgaatgcttctatgcttgctttcttgtttttagatgtgtgtgtgtgtgtgtgtgtgtgtgtgtgtgtgtgtgtgtgtgtgtgactgtggacatgtgcatgccttggcgtgcttgtggcaatcagaagacagcctcgggtggcagtgggagtgcatcctcgggtcagttttcatcttctaccttgttgactgagtgaatgggtagggctggcatcagtatgtggccctcactccgatgccctcgctctgtgaactctgtaatcaccagatggaatcatggggggaccatggagagaggacagcaaaatgggagtgggagcaaaatggctcataacagattgttaggccctgctgtgggacaaaccgtcacgttctcacccatcccaaggacaccctcaggggagcctggaaattgtaagaaagggatgaatggacacatctttcctgtagagcacagctcagtgttctccagacatcctcagggaaaggggaaagccccacatagtcatggggaagggtggttcagagcgaaggccctctcttcctggccaagtggaatggttcagctcagctgtgctctgacctcactatgctgaatgtttctggaagttcctcgtcttccctttctgagatgtggtttactaagccccagtctctctctagagtaatccttattctgggaccaccggctagagccagccctggaagagaaatgagctcgaagcatccgcagctactggtgctgaacgctgctgaagggatgttagaaggctgatagtgagaaagcatggtgtgtgtgtgtgtgtatgtgtgtatatttatatatgtgtatatgtatgtgcatttgtgtgtatgcatgtttgtatatgtgtgtatatatttatatatgtgtgtatatgtttgtgtgtttgtttatgcttgtgtgtatatgtgtatgtatatgtgtatattacaggtggttgtgtgagccaccgtataagggtgctgggaactgaactcacatcctctgcaagagcctcatgggttcccatggtgtctctagctcccatggtgtctctagaagctgagttttgtatggtggtgacaggcagtggccgtctgcatagcaaccaacactcccagcgatgtttcctgtcctgtaagacccttgggctgagagcaaaccttaggggtttcatggggatcttctacctgccaatagcagaggggacgcagcctagtgaggccaaagacctgggctgagatgagggcctcagtttctggctgcatcctttgctgagggcttgtgcttgctgcttggcaggacagctgtgacttccgacctggcattgtgccaggccagcactgacctcacctctttggtcgctgtttctacaaaagactgttatgccgaagggcgggactatcagcagccttagttttccccggctgtatgctgagggtggaaacccctttatagcttgttacaaacaccaaatcaaaacctggatgtggtgggtttaccactgttggagacttttcttcctgccttcccctctggaggagtcagaccatgatcatcccgtgagtgctaggtcgatggtgcccctaccatgcatctgtctgcagaactctcctttgttgtctggaccaggaactccggggcgtggtctatatgctcgggtctctgcactgagcttgctgcgttcagagctggcccaggcctttgtggaaggaaatagggtggacagttccagctgagagtggttagcatgctcattacaggttacaaagtgactaagagtgttctgtgagtactccctgcccttccagacttggcctggtgttgtagttggggctgcaagaagcaggcagggctgcagtggagggatacccagcggggtcacccatcagcatgttctcttccctacacagcgaatgcagacatctccatggaggcttgctgcacggatggaaatcagatggctaaccagcacagggactgctcgctgccgtacacctcagaatccaaggagtgcaggtgtgtgtgctgttaccactgtccgacatcacatgcccttctgcaggcaagcgggagaaaggacagtgtgcgccagatgtctgagatggtgatggggggaccttcctccctctatgcttctgagccctgcgcacagagcttggctcatggccctgggctgcccagtgctctcactggggcatctgttgccttccccaacctgaaaagtaaaaccatccagatgtgcagtcaggtctgccacagctgtctaactctgggcaagtcatttccccaggtaaaaggaaggtttgttgtacgtagagcgtcagatgagacctcgtgacttgaaggaacctgcccgcagaccccaagaacacaaacagttcattcacgcagcttcagcatatcttgtactctctctctctctctctctctctctctctctctctctctctctctagatgaaaccaggttactcacaaagtttggggaatgtaaaaccttagagtagattatgataatagagtatgtcggttatcataaagaaattatcagatctttccacagtcacatgtggagtgtgggagttgcatccagggagggagcagccaacgcggatactcaggggcaggctgtgcaggttcttggggcagcagcaaggcatccagagagtgtccaaacagagaggaccagcaggcagaaagacacagggctgaagggaggtgggggtgggggtgctctccattgttcctggtagtgtggctgttaaaggaagtaactaggatcggggtaagaatctgatggaggttttaggcattaattgcgtgccagcacatctgtccagacttgtctttaaaaaggcggttgacatgtgggagactaacaggctgtttggaagactctaggagatatgtaagtggcttggaactgggcagtagcctgggatagagagaagggtctggctggggaggtaagcggaggcagggagacaggttgtcagtcctgggagtagggtgggatccagaggggtgtcggcaatggcttaggggttcagtttgtctagctgggtagatgagtgagggatgccgttgggagaaggctgaggaggggtgggggttgggggtggggtagaatcaggctaggtatccttaaacacccagaaacccaaatgggctgttggtcctgctaggagtgtggagaggccaactagagagagaatctcagtgctgctcagagcagacctggggtacgaggggccaaccccagcaccctggggtcccgttctaggtacccagcgaatcctctccctaaagcctcgttagggcagcagcgccccacccctcaccaggttcatacagcgctcagaggaagagggtttgggacagactgggtgaccctagactggctgaagcagtggcacatcaggcagtctactcagtctcctttagtgaaatacctcttgcctgcaagtccaatgaagcaggtgtgaaattcatgtcactgtgtagtcatacccatcccggatctggagagacatgggaagcagggttcacacatctgagccccgggtagaggaaaggctagctgggcctctgtcagggaagcctccctgtctttgttctgtctgtattcctgcagacagtacgggttaggttcctgtttctgcccttgctgactctgcctttaggttacttaggtctggatgagagccatatttgacatccttccgtctctgttgtctgcagggctggctttctggcctctgagatgtcacaaaatgtgtttgagtctgaggcatagtagactctggcaggcccaggtcctgtttactgaagagcttttcgtagctagtcctgtgggtggcaggaggctggcactgggcatcatggttgctactgtcttccagtctagtcctttcacaaacggtgtcaaaagactctctgaaacttcccctctggaggctgaagagaatgagctaggtggaagggggggaggatggggcctgcagcctgctttgttcctacataggtgaggatgttctgtaactagtcttggcaaaaggccgagttgggggtctccttgctcccaccccggacatcattctgcatttgctctctctaaccaaacacctgctaagtcctactctgtgtctctctccctgtgggggctgggatgtgggggatatgtcataggacatcactcctctccttgagcctctattctgagctcaacttcaccaaggagtcctgctctgcccacaggatggtccaggagcaatgttgtcacaaccaactggaagagctgcactgtgccacgggcatcaacctggccagcgagccagaaggctgcgcctcgctccacagctacaacagtagccttgagaccatcttcataaaggtgagtaaggccaccaaggccatcaatctccctgtctaccttcccctgtgaccactcaggtacccttcccctctcattcagacggtatgccttaccagccagacttccagataagacagggtgagatgatgatgagccagctccaccctggggaaacaggtagagcctgagtctgtcttcaggcagaaggcagagcaggggttctctggacgcatcaaaatcctctcagttcagggtaggcatttccctattgcccaagagccccatgctgctctcctcctcaggtaaactgaggctctgagctcacaccagacccacactagggcctctaataacatgggattctgtaaccacacactacaggaagacattggagtccggaggggcccacactccagtggcctctctttgtcgaggactcagaggggattctccatagaacataatcagaataagtagtgggatttcttttcccgaatgttcctggggccccagggcctggtcaggttgcagggcttgcgttagctatggaaggcttgtgtgtgtgtgtgcatgggagatgactacggcacctctaggcttgaacacaaattgaccaatggtcaggccctacctgcccaggaagaaagccagttgtcctcctgagtgatttccagaggtattgatgacagtggcttctggggcgacacccatctccctccctcaggagggtggtaatggagccaaggagtgaaaatctgattagagtctggattctgagagggtgggtaggcacacggacagagggtgctcatgggtccagactctgcctcaacagctgtggcctaccatagccatcaggcctttatgaggggttggggaaggcactgacatgagtgtcttagtcagggtttctattcctgcacaaacaccaggaccaagaaacaagttggggaggaaagggtttattcagcttacacttccacattgctgttcatcaccaaaggaagccaggagtggaactcaagcaggtcaggaagcaggagctgatgcagaggccatggagggatgtttcttactggcttgcttcccctggcttgctcagcttgctttcttatagaacccaggactaccagcccagggatggcaccacccacaatgggccctcccaccttgatcacttttgagaaaatgccttacagctggatctcatggaggcatttcctcaagggaggctcctttctctgtgataactccagcttatgtcaagttgacacacaaaaccagccagtacagggagctaagcagggctagaatgggtggcctggttaaggggtctcttagccaggactttgagcattgagtgaccacctcccaggatagggctggcctctgcttatgttatatgcctggcagacagctctgccccatccctagacttgaggaaagagaggtgtgaaatattagaacattctagcaagagcgggagcagattccctggctggcttaatgaagtgtgtttctggaaaagattactcacaccgcataggagggtgagatcaccagggcttcttgcggctgcagagtgggtagaaggacatggatggagaaggccctcagcctctgcaggggctgaagcaaagcctcttgctggaggctttttgtttttagaaggactgacctgggacttttcctgtgtacccaggatctgggttggaacacaggtttaacttttgggatgtgaggtctctgaaaatcagtgactgggccccatgtcttactaggggccttggggctcttgtgcccaactcttgggcttgagagtgtgcgcctatttttccggcagggagatgagacctggcagacagagcaggcccttggagcattggtctgcccccttctcctcaagatgggtgggctgggctgggggttgttggtcaggaaagggaggtccagaggggcttgttgtcttagttaggatcttattgctgtgaagagacaccatgaccacagcaagtcttacaaaggaaaagtatttagttagggatggcttacagttcagaggtttagtccattgtcgttcagaggtttagtccattgtcatcatggcagaacacaggcagacatggtcctggagaagtagctgagattggcagacagcaggaagagagtgagacactgggcccagcctacgcatctgagacctcaaagcccacccatagtgacacacttcctccaacaaggccacatctactccaataaggccacacctcctaataacgccattccctacgggtctatggggcccattttcattcacaccaccatagtaatcatgtgggtggggagggaaagcagtcctactaggtgccaggtcttgtaggttgctttccaaacagacctaggaggcttggaggggcctggcatgcttttctatctacttctgacattttgataaattacccacaccagatgttttctctctgttctgagaacaccgacaagaaagagggtgtcagaggtgtgcccctgaggttctttcgaggtcccaaggggccacttgtacaaacccctgacccagtctggaatctttctgttcatagaggtgctgccactgttgcatgctgggaaaggcatccctggcccgagaccagacctgtgaacccattgtcatgataagctaccagtgtgggctggtgttccgtgcctgctgtgtgaaggcccgggagaattcagactttgtccaaggcaacggtgcagaccttcaggacccaggtaactcctctcccttccagtgcagaggagcagtgtgttattcttctctggggacgtgcatgtctgtgacttacccttcctgtgggtgtcacatttctggattctaccaatcccagattaacaatattagagaaagggggctgagagatggctcagtgggtaaagtacttggggtgcaaacctaaaagcctgagtttggcttcccaggacccacatgcaagcagcgtgcatctttaatccagggcttggggtgtgtagacgggagtgcccctagagctcactgtcctgctagtctagctgaaccagcagcgagcctcagctcagtgagaaacccggtctcaaaaaataagccgagagctgtagaggaagacactggatgttgatgtgtgcatgcatgcgtgtgacacctgtacacacacgtgtgtgtatgacacacactcaaagaaaatgttggagaaaagatcttgaatctgtaccgggtgtgtgcagacatttctcttgtcactccttgaacaaaataacaactatctacatagcattgattagcattaggtattaaaagtaacctagagatgatttaaggattacaggaggctatgcatagacaatggacagacaccatggcattctatgtaagagacttgaatgtctatcgattttttaaaaattattttattttattttattttgggggtgggggcgcgtttcgagacagggtttctctgtatagccctggctgtccgggaactcagtttgtagaccaggctggcctcgaactcagaaatccacccgcctctgcctccggagtgctgggattaaaggtgtgtgccaccacgcctggctatctgtcgatttttaaaaaagaatttatttttattttatatgtagggatgttttgtttgcatttatgtctctgcaccgcatgtgtgtggtgtctactggagccagaaacagtcatgggaccttatggaactattgttacagatggttgtgagccaccctataggtgctgggcccaaacctggatcttatggaactgttgttacagatggttgtgagccaccctatagctgctgggcccaaacctggatcctctgcaggagcagcgcatgccctttaactgctgagccatctctccacctcctcttctgtgggttttaatgccctccagggtcccaagacctatccccatggacaccaaagaacagctgtgtaaagagagctgtgtgattggcctcggagggttggagggcgggccaaagctccagggaaaagctggctttactgaactccaaaggcctttggctggcaggaggttctcttcccccccccccacccccccacccgtctccatctcttagggcctccaactgcttaagtgaggttcacttaacatctgggaggggccatatgctcctctcagagtccattgatttaaataccactctactgtcaccaaagctcccttcatagtgacttcccgtcaagttgccctgtgaggttgaccatcacggctgtgagacaggaagattgccacgtgctctgcaggaggctggctcccttgcagacctcactttgccctggcaattggtgggtgattgccctttgatctgatcctctcaggaaggccttgatgtgtaaggtcacatgacaaacagtgatgtgtaaggtcacatgacaaacagtagtggagggaggacttggcctttttgagtcttggccagtgtgagccagtggctgggtgcatctgtgttcaggtggcaggctcttcctcagagggctgtgggaccacagaagcagttctgttggccagctctacctgtccccattgactacagccacctgtgcttgaagccctgagggccatggctctgtgatataggaatttcttgttgtttttaatttatatttctgagtatgagtgtttcctgcatatatgtataccgtgtgccctccatggtcagaagagttctcttagaggacagaggagggaattggagccccaggaactggaactactggtggccgtgagccaagtgtgggagctaggaacggaacccaggtcctctgcaagaaagatgtgtttttaaccgctgagccatctctccagccccgaccccctggttctttcatccgctctcttacactgtgagctcctgagtcgtgcaggaagccctgagaagctgcaggcaatccgtgcactatgcttgctgggaattttacctcattcacatctctcttgagctttagactcaccgactacgataactaattcaggctgtgtgttgggagagcttacctgccccttcatgtgagggtacatttaccaaagttgaacgagtgtggtgtgctcggatgtgtccggtcctgacaggaggagcaggtgcttgtgtcatcttgtgtcatctctctacccctagctaagattcctgacgaggaggaccaagaagacccgtacctgaatgaccgctgtcgaggtgagatgttgggatctgtgggagtcctttggtaggtagctatgaaagcccaggggatagtgttgacttctgctaagactcagctggaaagtacttctgttcttggggcccttggggctccctgtttcttccacccttgagtgctcagagccggggggatctgtcggggacagtggcttatggaggcaggactggtgtgagcactccagtgccagcaagctcctgggctctgtgggtgatgatacttctccaaggctgcgatgccccaggagagtagctatttcttatctgtgtgtccctggagccccgcttgtccctgtagagtcatggtctcttaggagacctttgcacttacgttagagtgaccacgcagtgcagccttttctaactaaattctttttcttcaagaacattctggctcatctaacctgaccgttctgttgcagctccacccaaagggttcactctgcgactgggtgttaggtatgcaggcagcttaatcacaaagtgatagcgccagcactcagtgtcaacctgcgctgaggccaggagggaggggagagggagataaggagttcccaggaagcttggagtgagccctctctgggtggccacagatgatttctgcgagagtgacagccggtgtgacaacttaggaggatccattagccaccatcgctgtaaggcctgcgtgcccctgatagccagccaggctgtggcaaaggaaacacagatcatcccagtggggttacactcgaagtatcccgtgtgagtcacaggggaggtgccaggcagggagaggctgtacccacaattgtcacagcaccggacatggacatgggcaagctagcaggaatgggcagctggaaacccttgagagttacatgggctctgatagagccctgcctccaggtggagcctgttccccccaggcctcttgttgaccacgagcagtatgcctccccaggtccactctaaccacagaagcaacacaaggttcctaacttgtcagacctctgctgccttcagaggccccggagacgctcagagccgaggcttgggagtgtcccaaggaccacacgtggctgtggcaaggagcctgttttctgtgtccgtgcatcctggaagggtctctgaaggtcgctcagtctgttcactagctcccatggactctggttgcaggtggcgggccctgtaagcagcagtgccgtgacactggggacgaggtgatctgctcttgctttgtgggctaccagctgcagtcggatggtgtctcctgcgaaggtaacatctgagagctagcccctgtgcttcggagcctctgctgagcaggcctgcgtggcacaacctttgttccattcctggaacacagctgggacctgcgtgctgcctggacaaggctgtcttctagaagactatagatacagtgtgggcaaagggctgcattggggttcacctgggttcaggatctgccgtgaggccttgggtagatctttctttctgcctttcccgttgtctaagagatggggatgatgcatgcgacctcctttgtgggagtcttgtagacgccatgattctagggtctggcccttactcaaagagatctgaaacttaacagagcttgatttggtgtctgcccctctccagatgtgcccacagcaagactcagctcagtttgattgggcaacttgatgaatgcaggaagccagatccaccatggcttctgggacattccttctgctcaagcttaaggcttggttgttcttgctggttacttctgcatcgccttaatctctctagatatcaatgaatgcatcacaggcagccataactgccggctgggagaatcctgcatcaatacagtgggctctttccgctgccagcgggacagcagctgtgggactggctatgagctcacagaggataataactgcaaaggtacagctcacatccaaacctaaaactcaccccttccccagctgtgggtatggcctagagggaagggcccattgggctctgtggtgctgcccccatgtggctgcctcaggtactgcaagaaggaggagggtccacctccttgcaaagtacacaagggcaaatgaaggaaggtctgtgatgagcaggtttacttcaatatgatgctgagttagtgacactagcccatttgatttagaaagctcggagcctgatctttgacaaacaagtccagggtcctcgtttgtgtttccgtacaaacagaaccaacccagatgaagttgaagatgcttgctagcgcaggtcttgtgtaaaaatgttgatcattgaattatacggggtgacccaagagccagatgccttctcttggcagccaagcccttgagcaatcccgctgccccaccctgcactgctgcctgcctgagcctctggactccagagcctgggagccaggccagctgagtagatacacttgaacctttgacagccgtgaacttcgagacagggcaatctatcttgtcctatcttgatgtaactattgttaatatttggactattatgaagacctcgagataaaaagaattaaaagtctgtgtttattgtcgctaagataattgctgtatgatctaatccaaacatacacttctcaatgaatgatatacctgccaggaaaatgcctaagcgatttgttaaatagcaaaaagcttgcctcataagtcagggaggaggagtgtttttttaagagtgtttttttaagactttagcaatttttacacagtttggctcaccgtgggccttttcgtaacaccctctctgttgaaatattttggggttatagtctgagaaatgagcctttttttttaaagtactttcttgtgatattaaagtattgtgacactcttctggctggactcttgctaacaatctcctttttttacgatgcaccagatattgacgaatgtgagactggtattcataactgcccccccgattttatctgtcagaatactctgggatccttccgttgcagaccgaagctgcagtgcaagagcggcttcatacaggatgctctaggcaactgcattggtaagacacgcgccgccgtgagcggggttagtgcgagcatgcgacagtcagcccagatcagggctggtaaacttccttcatgggcaaaaagcaaatgtcataggcattgtgaaccatgtggccacagtgactcatcctggccaggtacagtctaaagggcacagcgtgtagacccaggtggtggggctgtgtctcaataaaactttatttataaaactactggcgatcagggttaggtctaaggccgggtctaagggtctaatccctgtgctttgggtgaaggggtttcagactcagagactattagattcgaacttgtgccaaggttcatttccttcgttggagcctcaggtgtttccccttaagatgggcgtgactgtagcatctagctgagaggctgagaacaaggacctcggcggttgcttgtgataggatgggtacatgagaagcatcctttgacgtgtggttgctcccagccacagccacttagaccttcggaaattgtttcacagaaaaatggttcacttcgtagagacagactagagtggcgttcggtggagacagtttcaatctggaaaaggataagactcaaagatgtgtgggttgagagccgagtgaaccagtgtataaaggagccatgagctcagtgtgatcataagagtccagagaaaggctgctcagataggagggctacctgcctctctcttctgttgtctttgtgctgcgcaggggcaccgcctagctgttagcatttgaagtcttatctgctttgtaggcaggaacttctaaacctttgctttgaggtcagagtcccttcttctaaacagctgcaggtctgctggctgcaacccctctcctttcaaagggaaaacactagacactgctgtgcaagttcctctcttatctctccccagacccttacttagcgttgcctctgtcttttctttgagacgggattgaaagttcacttcccctgtccctgtcttactgctcccaggtagaaccttttaggccaggagtttcacccaagcccctccccatccagcctgggtcttagctagtggagcagtgtctgagctatgagttggccctttcccagcctcctgaaatcagactgtcattgctacacactcatgcagtaagcagggtggctgtgacaccccctggagcagggaggaaagggggccctgctgagacttgcagcctcctcagggagctcaaacagctgaggatggaaaccctgactcatggcaggaccggccctgctcgcctctgtgagaaaacctttgcaggtctcggcatgccccaggtttccctccacagagtgcaaggcttcgagagccatccctctgcactctcaacccccaccagatcagatagaagccctgggagagtccaggatattggtcagatcccagcctaatggcatatacatcttttgtcacctctgtgtaggaccacagtgacatcaaggactagagatgttcagtgcagaggccccctaacttgacatggggagaggtccccctttgtacttactggtcacagccaagttaatttcttctagaagtaacttcttttatggtaaaaaaaaaaaaaaaaaaaaaaagaagccacacatatctgattatagatgaggaaaacctgggacaaaaaataacgcccagcctgctcagccagcctctagatgagcggggccgcccttctgggcattgctctcttagtttgttttttcatggaaacaggaccggactgttctaccacttggtttttccctcttgacaatgcgtttagaattcgttctgtgtcagcatttttattcctgtctaaaataataacatcatcagcagaaagagctatcaggagacagacagcgtaaggagagaagagaagagccaggtaccatggagcgcccctgtcatccctgcagaggttgagggaggagggatacaatgagttgaaggctagcctgggctctataggaattaaagtccagcctgggctacaggttgagacccagtttcagaaatccaaacaatataaaacccaaagatgggggccatccaggagagagctgcaggctgtcttttctcctctctatgtatccagggcctacaccctacacacttctacccatttttccttgatctccatctatggtgggtgtcttagttaggatttctattcctgcacaaacatcgtgaccaagaagcaagttggggaggaaagggtttatttggcttacacttccacattgctgttgatcaccaaaggatgcaggactggaactcaagcaggtcaggaagcaggagctgatgcagaggccatggagggatgttacttactggcttgcttcccctggcttgctcagcttgctttcttatagaacccaagattatatataccagcccagggatggcaccacccacaaggggccctcccacccttgatcactaactgagaaaataccccatatctggatctcatggaggcatttcctcaagggaggctcctttctctgtgataactccagcttgtgtcatgttgacacaaaactagccagtacagtgggagacagtgaccccagaatctgccgtccccaaactccactgcattcccatcccggtgcaaggaaggatgaaccctgccctgtcagactagcacagaagataagaggctgggctgagaaagctgaggccttcttcatacaaaatgtaaatttttttagaactttgatgctgattcctcaacactgtgaggaagtcttttccgggttttcttttccttcactctctacctcatgttccctttcttccttcattccctggtgaagaggagggaagggatcaagggcactgtttcccacacactagcccacaggtgtgcttcccacatgctggcccacaggtgtgcttcccacatgctggctcacaggtgtgcttcccacatgctggcccacaggtgtgcttcccacatgctggcccacaggtgtgcttcccacatgctggcccacaggtgtgcttcccacatgctggcccacaggtgtgcttcccacatgctggcccacaggtgccaggttctttaaggatcctgaggccattaagggccctagttggtcttagaagtgctttgtaagacaaagtgagctgagagtgacagccggagagcctgcacttgtgccatggggatcccatgagggaaagcatgtagtgcgtccccaaacctgcctctagcctcctatctattcatcttttgttgatccactttcaatttcattcattcatcatctgactttcctggagtcgagatgagggactctctttccccacacagtctcaaggaataccagtgtttggatcctgtcttagtcagggtttctattcctgcacaaacatcgtgaccaagaagcaagttggggaggaaagagtctattcagcttacacttccatagtgctgttcatcaccaaagaaagtcaggactggaactcaagcaggtcaggaagcaggagctgatgcagaggccatggagggatgttacttactggcttgcttcccctggcttgcttagcttgctttcttatagaccccaagactaccagcccagggatggcaccacccacaatgggccctcccacccttgatcactaattgggaaaatgccttacaactggatctcatggaggcatttcctcaagggaggctccttttctccgtgataactccagcttgtcaatttgacacacaaaaccagccagtacggatacagtttgggaaatcacatcagatgtgagcactcaaggctgagggggtcactctccaccgacaacagacaggagttgccgggttttgcataaaggaatagataatgcccatcaactttcaggccatctggtttctatcgtaatcatcagactcccgtaatggtaatgcccaaaacagctgtaggccacaagtgagacagcaggactggctgactgacaataaaactttatttacaagaataagcagtgggccagatttggctagagggatcttgaggaaggcgactgggctgttttgccttcttcacccttgtgagcctgaggtgttgcttgctctctccagatcctgggttcctagtgtcacacatagacagtaatacagcctctgccaccagcaggctgcctgttgcagcccttcctgctgtccccagctccagtgtgccttgtgcgtgtgactttaggaagatcctgatgttgactttctgagacgtaggtctttttggctatgccttaggaagatgtttggttttggcgtagagttggagcataaagagccaacagatgtgcagcccagtgttccttggtactggtacatgtttgcatgtgtccatcaatggtaaatggccagtggtccctgtactagagtttgtgtcctcgcaaggtcggaaacccgtatgggagttctgagtggcctgagtcagatggatagggatacaggaaggagtttccatagagatggtggggccatggctggtccagggagctatattactggggcttccaaggactggcttggtgaagtagacaggggccacccaccgaccagaggagcctagggtctctcaggctggtacagagggatgggttttttctgtctccctggcaccacactcagggtagggccttatctacctgtgtgggtgagatgcatacaggaaagccaggccagcaggtgatgcagaaggtggagtaattgtgtttggaagcagggggagaggacaagaagggacctgaggctgccctgggtatcttgtagggtgaaggggtcagggcctgttgttttgtgactttactgagagaaggaaaaggctctttgggggagttcagtggctgcatttgtgggtagtgtttatgtttaaccatgccatatcttgtctcttttctctgtagatatcaatgagtgtttaagtatcagtgctccatgccctgtggggcagacatgcatcaatacagagggctcctacacatgccagaagaatgtgcccaactgtggccgtggttatcatctcaatgaagaggggacccgctgtgttggttggtatctcatacacgtgcctgcctgcacacacacacacacacacacacacacgctccaaaacacatttctgaaatttgacttcctgtctatttccagcacattccttctcttctctagaagggagagttggtctccaaagtgaagacattctacctatccatccattcccttaacccctccccaggcacaggcctttgctgtctcactcgcctgccttattacagtaacacaccggcgcttccagccttgccttcagtttgcccagtgttctcaggctacctggtcatagcctatccgtgaccaaggacggacactcacaattcaattcttctaaagtggtcacagctaatctggatggcataggtcttgctactccccagaggacagaaaaccacggggtggtatcttgtttatacccaccacatgcctgctcttgagtaggccaggggagtcagccagcccagatccctgctaggaaaagggaccatcttccccgaaacccccaggccatctcagcatctcccccatagccctgggaacttcctgcctcactggagatcagtgctggcctcttggagggttcactactgttccagattgggcccgggacatagtgggtgctctctgaaggttaggttgctgccctcagtggacagcttggtgtgcacactaaaaggctttcagcatgtcttcctttcttcttcacaagatgtggatgagtgctccccaccagcggagccctgtgggaagggacaccactgcctgaactcccccggcagcttccgctgcgagtgcaaggctggcttctattttgatggcatcagcaggacctgcgtgggtatgtgatatctctcagactccaggggtcctggctgggtgacaccaccgaggggacaactctgtggcatctagggtgaccgtgtccgtcccatcctcatctctggaggttccaagcgtaggcaggcccagatggaaggccatcagtcagaagacattatccaactgtagctctgctgccaccttggcctctgacctccagcagggctttagcctgcttccgtgcagaatgggtgttctgtttgacccccagcctccaagggtttccaagtctccagcccacaagatgttagtgatttctcagatttgctgcagacctgtagggcccaagggcttgggaggcacagctcccaaaggtagtcagagcaaaaggtggccaggtgtgtcggtgtcagaccctacccagtgagcacttgctgagaccaaaccacgatactcgatggtggcaagaactgccccgtgctcccaacagatccccttagactcctcttgggcggggcggggctggcagaagggcacctgtccagcttcaccacatttgtcagagcacagggcttcacacagactgttaggagaggcctcagcccttctacctgagacatgaagggagttaggggtagaggaccatgaactgctgccattggcagaagggtgggaccgctccagtgaacacgctctgagctgactgcccctctgttttcagatatcaacgagtgccagcgctatcccgggcgcctgtgtggccacaagtgtgagaacacgccaggctccttccactgcagctgctccgccggcttccggctgtctgtggacggccggtcttgtgaaggtgaggctggggtcacagaggaggccagccatatctctcctctgctcataaactcatttggggtttcctaggcaggcgttttaaagacgctagaatccccaccctagggatatgactgtaagtcagggccagccatgctgaaacttggccagtatccctggcagggtctggtcagtcatttgagttcatgagacttgctgtgcacagataacagagtgtcttgtattatcagctgtgattataatttctggctgtgcttaggcatctgagccttgtgcttgcataatccagaggatacggtgctgaggcccggctggccttggctctgctatggataattaagcacatgcaatgtgggtgtggcaagacgtggttccagtgtcaggggctttgtctatgataggaaaccacactgagcgtagattgagcaggtaacctggccaggcatgtgggggctacagataggaaacactgactaagaagctatccctcctagcctcggagacagtagtaaatgaatgtaagaagacaagatttttctctcccagatgcgcgggtgactgttttaaacctttctggccagtctgtagagagtaccttactttgctgtagaagcacaaaagcagccatgggtcccagccaaatgtgtttgtagctctgtgccaataaaactttatttacaaaaacaagtggtgggccaaacctgtctaggagcttgctctaggtgaagagaatgggtgatcaatagctgggttgctgagtagctcctaagtccagagatttaggagtaccagggctaccatcccacctacgtcaccgtggtcttggagatgaagtggggagggcaggaacacttttcactgaaagctagaagggactggtcctggtgggactctagatatgccatggtgctgagcctgtgccctgtggtgaccggattgaacagagccaagcctggaggctgttgctgccttcttaccaggagatagtgtggcttcacggaggcagtagcaggagtggagaaactaaagatttctcagctacagtgggctggagtggaggtcactctctctgagcatctcagtcttgcaacttcaacagggaggtgatgaagaagtattctgctcagtgtgttctcagtcaagtctgccccggaggcagggacctgaccccacctcccaggaacctcttctcttctagatgtgaacgagtgtctcaacagcccttgcagccaggagtgtgctaatgtctatggctcctaccagtgctattgccgacgaggttaccagctcagtgacgtggatggggtcacctgcgaaggtgagggcaccctgtgttctatggggtgcaccctgaccttgctaccgaacagtagcatttcagaatccatggccgggggaggtttccccacctggtgaggttcccatttgctcccacggaggctgggctggctcctggcttcccctctgagagagcttgaagagcttctacagggagagagagagagagagagagaaagagagagagagagagattagtaggagagcaaatgagtccatggatcgctcttaaatgcacatgccatggctgcaacgcctcagtgtgctgacactctgggccatggagcacagggctcagcatcacatgtggctgagaggtgaagggcaacccgagagccacccaacccctgagacccaactctgcactggccttgtgagcttcacccttactaggcctgactctcatcttctctgtcaaaggcaatgctccctccttggactgttggacaatccaaccagatgacagttcaggagtacccaggagcttcaggagcaaatgttactgatgctatcacaatgctgtgtgtgtacatgtgcgagtgcatgtgtgtgtgcctgactgcgtgtgtgtgtgcgcacatacgtgcgagtgcgtatgcacatatgcatgcatgtgtgcaggtgcttaggatccagcctagggccttgctcagcagatgccattccactgagctctgaccccaaacttgaagctttttgggtacctgtgcaactctacagtgcaaagttctataccctgagtcacagtccaaactcaagtgcactgaaaatactgtctagcaatacctttagcctgtgtgtataaaacggatagatttggggcctagacttgacccccatcttcaggatatcttctggtcccaagcatttcaaataagggagactcagcctggtttttcttgtgatacgtacgtggtgagttttgtttgtttgattggctggttgggttgtttttgtttttttagcaaatggctcttcattccctttctttgtgcgtacttcacaccacaaacctgctaaatatccctagactagtcctaccccatccctgggcctcagtttctccttctgtaatgatagtctctgaggccaccccagcctcagggactctgaactctcttcttggcttgccttctgtggctgccctccacagcccagcctggccacgtagggctaccccttggtccagctgcggctgtgacagtgcacaggtgtagatgctgagggagaactgtaactgcgctgttgcagatattgatgagtgtgccctgcccactggaggtcacatctgctcctaccgctgcatcaacatccccggaagcttccagtgcagctgcccctcatctggctacaggctagctcccaatggccgcaactgccaaggtgagtgagacagattctctgtgttggtgtccaggggtattacaagtcccacagtgtcgaggtagagatgtgcttctcagatgtaggggctgcaccacagatggtctcccatgtgcagcatctagcctgtccccggggctatctgggctctgtgaaggtcctgttaggtaagaacacccaagccctcctcctgctctgtccttgtcagaccttggaagagtgaccagggaccctgtcctcagcttagtctagttgtgcagcttcttacccagtcattggacagacaagctgtaaaccaagtcttgagtcctggaagtgagcagatgtcacctgcaaggggctgactgtggtctggtgttgagaatcctgaggtcgctgtatttggggactctggtgatggcgagtgtttcgtgggcttgggtcagctctggcatgggctcagggatgaaagctggtagtatctgtccatatctgctccctgtttctaagaactatctgggattcccctgcattgtgtgagccacggtttggttactaagagcgctgaggacaagcttgtgaacacatgatcctatctgtacaccctggctcacaccgggagctgcctgaggagatcagcctcttcctcatggctccccatgagctggaggtccagaggctccagagacccccgggttctgcacatgaagatggtctttagtaacccttgtatactgggggtacagagaccgacggtgaccagccaagctagccaagggctgagcacaagatttagtgaaagatactgtcttcgagggagggggaggatgtggggggcaatagatgcttgatgctatacacattcatgcatgtgcacccacatacacatacatgattgcatgcatgcacccatcctcatacacacacacacacacacacacacacatgcatacaaccatcaccaccaccaccagcagcagcagcagcagcagcaaagaaggtggccagccaaaggcagggcctgtggcattctctggaagggacacactcagtttctctgaggttggactggacctcccccacacccccagtcctgctttttgctctcctggcccagcttcctcaccacagcctgaagtcctgcccagaaacagcaaaaacgcattctgggctggtgaaccgaatggctcattggctaaggctcttgttgccaagagcctgagttcaatccctgggcagagtgaacaggctctttgcaagttgtcctctgagctccacacacatgctgtggcacatgcccacacaaataaaaatgtaaaaacaccgtaagaccacattcctgaagccgtgctctctgggattggccagggttgcctttgccagtggtagtcaaacacaggacacttctcaacaactgcctcctaggctcagtgatacctctggaccccagaagttggaatatcatagagggggatcccccatcttgagaggccccaggccctgtagaggacctccaggcctggtccccctgcctggccactttagtcactgccctgagacccaagacggattgcatggttcctataggtcttgtttcctcacctgtcctactagatggaaccagtcatgcctgaggtccaggtggcattccttcagagccatggaaagatgctaggtggttagctggtgcccacctaatggggttcaaagcttatagaatgtgcgactgtgggcaggttccatcagctgtgtgagccttccctaagatgaggattgtaacaacacttcccaggcagtgcttatgggaccttcttatgctgtctgctcttgttacacacccccactcagggatactgtgtgctctggagtctggtaactcttggtgtctagtaaacagaagatcttgcaccagatgctacacccacagagggcaagggtgtcaacacacagtttgtgtaggtggggatggttttcgtggctttagcctagatcatgctgtctctgggtggggatggctttcatgaccctagcctataccatgctgtctctgggtctctgcagacattgatgagtgtgtgaccggcatccataactgttccatcaatgagacttgcttcaacatccagggcagcttccgctgtctgtcctttgaatgccccgagaactatcgccgctccgcagacacgtaagtccctggggcctgctgtcatctgcctgggttgggctacctaaaggtccagctctgagaatgggcaggtgattcacaaggtcttcttagggttctcctattgggctataggaacctgctgattcttggttctcaggcccccgagggccagtgagactatcaggaggccacgggtgtgaccgcagatgaatcttggactgtgggcgtgctgtcatggagataggccccaatctcttcatctgtaacatgaacgtgtgcagttatgctgactcagatgagcaggtggcaatgccatctcacagtcttggccaaaacccaggattcaaggtgactttctaaggcatctgcattccgtctaactgaattatgtgtgggaacagcatggcgtatcctgtgtcctatactggaaactgtgcccttgtaagttctgatcatcacggtgacatctctggtgtccctggggccttaggccatgattctcacagcaaccaccatcatttgagttctgtccagagagactcatgtccttgcttccgggaaagccccactctagagctcattccaagagtgtggactgataacctctcccacagcacggaaatgctctcagcaagtacatggcccgacagcttgcattttccacctcttgaccttgcacttgtctttggctcttggccagccattgctcctgcacaggggtcattgtttcctttcgatgatgcttcagactccgatgttcaccccatgaccttggggacagctttttctgctgtggtcctgtccagcttctggcttgctctgccttggcagccctgagttctttcagaccttgggctgcttgcttaccactctgcccgcatctctgagcttgtttttcttctccttacaaacctatcacctgccttgatgagatgatgctaacctgtaatcccagcactaagaggcagaggcaggtgggtgaccagcttggggatagcctgggctacatattgagaccctgtctcagcaacacccaatgccttgtttctttctgtgtctgggtgaggggaaaagctactctcagagtctgcaaatgtgtccaatccctaagagagcaggggttacgcaatagcctggctgttggggcaaagctaccctgagtcactaagaaagctatgcacccttggtttgagactatgttctgtttcccattataaatacttgggtttgaggattccagaagccaggctgtggttgcaatggcaaattctaactcctgtgcagccatcaggctgaaagaggaggctgccctgctggggtcaggacatacgagtccatgggtaggcagcttgaccttgcttactgagtttgttgttaaggttagcaaaaaccaagtgctggtggactgactgtatacgggctcctgggtaaacattgatccatggatgccctaccacttgggccagctcctaggagcatgtgccagacaatgaacagagtacacagcatgctgagagaatggagggatgccagcctggtggagacgggtgggcaagtgggatggtattggccaggcttgaattaatgccactgggagctgaattgggcagtgatggagatctgagagctgcacacactgaaatagtgtatccttgggattggtgtgcctttccttccagtgtgggtttggtgtgccaggtctcggctgtcctgtcctacagcttctctattccccacaaaacaggccggattcggacacagggatgagggaggcggggactgatgcttcaaccctgggaagatggctgtctaccggtgacactttctgtccttgtctgtgtatcaccaagagccttaacagggactggagaggagaatgggggtgggggaggtggaggtggagccctctgtactgaggatttgggggaggtccaagtgaaccccctgggggatgtttttcttccaagcctcatgcttgactgacattctagaaagatcatagctgtggagtcaggctaacttgggtttcttggagcgtcttgtcttcagctataagatggaatgttggggtggacttcaggggtccctgagagtgacccctgattgtggggcacagccttcctctgcttcttctatatagattctgcccagtggatggggcagacattctaagacacatacatccctgcagtactgttgggtcctctgtggttatggtttgtaggtctgggaggccgggtagaatggagaaacttgggctgcagtgtagaaatgctgggcttctggcctttctaagtgctctggccctgggtcaacgttgggccacctatgtgcggtggtaccaagatgacttacgtggtcaggtcctgataatcagggatggcaagcctgtctcagtgctggtccagtgagcacattgtgatgtggtagagataagggtggtgggacattgtccttctccccaatgtacaaaccagaggacaaaattccttttgagtggcttcatcagtttgttcttctggccagttgcttggctctcggatggggacagcctgagatagcacatgaaggactcatggttatggcttcctgatcgcagctatataggaatctctctggttacagctttctcctttgatagtccctgttcagttgtagaccatttgcaacagcagtgttgggtggaggaaggggtggggcctgagtctcccgtgggaaggtgtcacccattgttcacctcagttagggggtggcacatttgagaagagactcacttcctggcacatctcagatgagagacttctattttacaactcccttttctcctcattagaaactgagctctctaaattccctgatctttacaaaggaggctagtagacggagtaaaccagatgccgcggcagaacgcttgtgacctcagccttggtgaggtagaggcaggaaggtcaggagttcagaatcagctggggctcaatgagaccggtctccaaagagagaaaaatgaactgggctgaggaaatggctcagcagggaaagctcttgccatacaagcctgatgactggagttcgggtcgccaacacccacatagaaatgcacagcagcccacctgtaatctcagcatggagacagaggattcatccacacaaggtggctgggtagaccaactaaattgtcatactccgagttccagtgaggtgccctgcttcataacatatgtcagagatcaaagaagacatcagacggcaacctcgggtctccacttagacgtgcataccagatgtactgaacatgtatgaatgcatatacatgcacacaaacactgcatgcatatatacacatacatacatatatatgcccatatatatatactgggcatctctcctgaggttcctgctctaggggggagcttgtttggaactttagtgggtaagatgtgagaatcagtctcttctaccctctgtgtgctagtgtgctctctctgtctctctttctctgtctgtctctgtctctgtctctgtctctctctgtctctctctctctgcctcaggccctttctttcctcatgtagcttccttctctcctgtgctgttcctggctacccaggagcctgaccaagcaagccaggaccacaagccaccaatgagtctcgtggacacactgaggtcccgacctctgagtgcttgctactcctgtgttcagggctacctctggcacccgatgggactgggtacatcctttttcctgcccacagagccactcggatggagtatggttgtaaagctgtcatgaggctgggtagctttggatactgagtcttaggaaagtagctaaagtgaaaagctatggtcacagagctcaagagggacctggccagggacgacagatggaattgacgtccgcggatggtcacaggggcggccctgctgcttttctctgcgcttttgtctctcttccgtggaggcttctgatcattttcacagaacttgggctgctgcagtcaaagatgttgaagctgagaattgggacacattgcactgtaatgcgtatatgggaaacgtgtggaagccgtgagcctgcttgccatgctgagctgatctgaggtccagatacacagacacacagacacacacacacacagacacacacacacacacacacacacacacacacacacacacacaccccgccctactctgtaatagattcagtagtgactgcccacccccatcggggtgattcagctaacagattttattgctgtccctagtctgaccagtagattgccacacagtgattatggtttctgggatgtttccttccctctatttccctcccctcctctcccctcctctcccctcctctcctctcccctcccctcctctcccccctcccctcctctctcttcccctcccctcttccccctcctccctttccccctcctctcctctccttccctgtcttcccccttctcccctccctctcctctcttctcctttcctcttccattttctcccccctcccctcttcccctctccctcttttctctccctcttcccctcccctcttccccttctacccctcccctcccttccttttttcttctctctctctctctctctctctctctctctctctctctctctctctcatttttcaagacagggtttctccgtgtagctctggctgtcctggaattcgctctgtagaccaggctggcctagaactcacagagatcttccagcctctgggactaaaagcctccaccagctgatgctgatccctaggatgtttcaataaattttggggcagagaaggaaactcaaggtccaagtctgcctgtacagtgaccatttacaaagtgtgctggcactggagatagagccaaagtgccacagtgagtggcggagtcacggccttttgggaagtgagtggtctaaaaagagccaccccaggcacctcttccagggaggtcttggatgctctgatggatgacagcgtcatctctgtcaggctctggatgtgacagtcatgggagctggatcagggcatcatgcgtgtctcacattccttcccttcacatttgctgtgcttttgtggcaactcaagacctagtctttggtcggtagagggcctcacagacaagtgggaaaggtgaattccatgagggagactctagcaccacctactgaccagatccatttagattgctcccgaagcagtatgtatgtgtgtgagtgtgtgtaatgtgtgtgtcattgtgtgtctctgtgcatgaatgggtatggtgtgtgtgtgtgtgtgtgtggtgtgtgtcttgtctctgtgtgtgagtgtgtgtggtgtatgtatttccgtgtgtttgagtgggtgcggtgtatgtatctttgtgtctgagtgtgtgtgtgtgtctttgtgtgtgtgtgtgtgtgtgtgtgtgtgtgtgtgtgtgctctaaagggaaataggccaactttgaaacccaaacttactgcttgctgcccttgacatcccagaggaacatagcacatgaaccccagctgcctgcctggctcttatggccctcccttctcccagtcatcaaaggcccttccttgatagaaagatctctctggcatgtagagtgcccccattttacccagtcctctggcatctccagggacggctgcctttcagcagtgcccatgatgtccaccttattccctactgccagctctggactctcagtgacaggctctgtcttcagtgggcatggttctctcctgtcactggtgttgtggatcttacttgaaggacttctcttttcttagagccagaatgttaactagtcaagtatgtgagaggcttcctagcagccctgataagcatccaataagacacaaacagaaacgctgtgcacaagaagtgtcaaatgtgtagcaaattcaggacaagacatggagacttaaaaagccagaggagggatgtaatgcaagaccctgagagattccgtgactggagaatccaaacttggtcaaaatggcagacctacttgaggaggacttggtcaagtccaatggggctggccatcttggctctgcttcttaagttcctgtcattctgcctttatcatgtgttgggcctggttcaggactagaactcgagtcctgtcattttcctgtcaacactctgtcataagaatgtactgttgtcatcctgttgcaggaagttagaggctataattagatgctactaagagaacttattctcaccttagcacaggaaatcagttcctgtgacaggaagttagtacacgtctccattctgtaacaagaagtgagagcctgttaccatctctaacacacaagaaattaggacctgtcttcattgataccacatacaggaagttagagtctgtcacaggaagtaagaacctgtcttcatctccaccacacaggaagttcggtgttgtcttcatcctgtcacaggaagttcagtcttgtcacaggatattagaacctggcattatccccattttgagccccactctgtctctatggacagaagcagagaatcggaccaagtgtctaaagctgaatcacagggctggggaacggatctcatccctgagcttagacttggcatcttccttcacaatgtggctctctctgaacctttttcctcatctgacaaggggcactcaagccgccatcttgaacactggttgtgatgacgccaatgaatgtatgggggattagccccacatgcaagtacgtggtaacagccgtgatgatttctgggtaatccctgagatccacccaggagttcttcatggccttggccactatctgggtgaggcccttgctgagtgtgcccagggtagctagctctctgccttgagaaggggacacatctccccctggcttgaccctggtcaccagtacccctagagggtgttgctgtacctgagtctgcggcctggaggtctacaacgcctcccccaggtgagtgagggttttctttgtgctggctgcatcagtcagaggggtggcaggaggccccacccagtgaacaggaggccccgcctagtgagccgtgcttgcccacactctgttgtttctctgcttgccgaggtggcgctaaccctcttcctgtctctctgtccacttgtctttcagccgctgtgagcgcttgccttgccatgagaaccaggagtgccccaggctgcctctgagaataacctactaccacctctcttttcccaccaacatccaagtgccagcggtggttttccgcatgggcccttccagtgctgtccctggggacagcatgcagctggccatcaccgctggcaatgaggagggctttttcaccactcgaaaggtgagccaccacagtggggtggtggccctcaccaaacccatccctgagcccagggacttgctcctgaccgtcaagatggatctttatcgccacggcacagtcagctcctttgtggccaagcttttcatctttgtgtctgcagagctctgagtgcttgcttgagccctgggcactccctcttgttgctttcccacccttggggttctaataaactctcagcagccatcccaagagcatgcctcttgtaccttggttttatttggcgtggacaggggcctctctgctttctctctacccggggttaagctgagcccctaccagaattggtttccctaccgtgtgactggggaataacttttgtatggtctaggtacctgagaatcacagcaacagagttcatcattgcattatcagacagccaaagcaagaggagaatgaggctaggctgggtctatacctgtgaacgatctcttcctgttgtataaactctaaagagtagttgtgacggctgagaaggagcctccttctcagagatgccctagttctgcctccttcatttttccaatatagaaacactccccaacacccccaagaaagggaaggacttggctctaatggctcagcttgttgtagccaagctaatctggggtaataggccttctagcccctggggatcacatgtaggatcatcagagctgttctgggcaaacactgaacgctgttgatctttgataaagtgcttgactaaagaaactcatttgcctctactggtccaccccaccccccaatactttgccaagaagaagcactgttgtggtgcttgctggaaccataacctgtctaacatatgtcgtatatacttccggtgtgtattgtctttgtggatactcagagagagtgtgatttgcccaagatcacagaggtggtctgtgtaccctagctcgacagctctgcctagtccattctgtcacagtccctccgctgtgaaccctgagcctcttgcccctggcttctccttcatgagtccagccaacccagctgccgatcttttggcttcaactagacttgcctcacagtttgttcttggcttagaagctagagcattttgaagaactggcctaagatccttcgatccttcatggcacccactgcatgtagttgctgtccctgttctgttctattctattctattctattctattctattctattctttatttttaaaatatctattttatgtgtatgtgtgttctatctgaatgcatgactggtagaggacagaagagggtgtcagatcccttggaattggagtttcagaccttgtaagtctccgtgtaagttctgggaactaaaaccaggtcctctgcaaaagcagctggtgctcttaaccacggaaccatgggaactctcagtgagagtttcaggggcgggcacaacttcatcttagtgtgacagtccagcctgacctcaaattactctccccgatcacacttccctgagccataatgacataattttatacccttagcctaaaagctacttaaatctcagcttaagtaggctttcttcttcagactgtattaatccatgtttttattaagataacaaattaccaaagactgggtaacatcctgaagaaaagatgcttatctacacttgaaggtggcccttcttgcaggtgagtcctgatgtgtctcaggatgtcacatggagcaagatgtcacacgtatgagcatttacatctcttgtcttatacagccttaagaattcagttgtggggctctgccatagtaagcatctcatcccagccttccttacatcccgtctctagatatcatagttgcagtgagtgcccacgctcctaatacctcaataagaattaaatgtcaatacattgaagccttgggggatgctcaccatatcctttctgttacagaagctttgcccaacactccaggctgtgttctgtctctcttgctttttttttttttaatttttaattttttctggcccagctccagccatatttatttcatataaatgtgtgtacactgtagctgtcttcagacacactagaagatggcattggatatccattacagatggttgtgagccaccatgtgattcctgggaattgaactcaggacctctggaagagcagtcagtgctcttaaccactgagccatctctccagaccgtctcttttgcttataacactatctttatggtgcttggaacagcccaagattcccatttgcttcagttttctgaatgtgtctttctcatcatctagaagactcaacaaaggcagggactaggtctgtttcatcttgcgactgtcctggtcttctaccaaggttcggggtacacattaggtactcttgtctatgtctattgagaaaatggagatcatgccattaatactggttgtcttagggtttctattgctgtgaagagatgtcatgaccactacaatttttataaaggaaaacatttaattggggctggtttacagttcagaagattaagtccattatcatcatggtagggattgtggtggtgtgtaggccgacatggtgcctcagacgtcgtagctgacagttctacatctagatcagcaggcagctgagagaaggacaccaggcctggctttagcttctgaaacctcagagcccaactccactgacatacttccaccacactgaccccagcaaggccacaccttccaatagtgccactccctttgatcctgtggggaccattttcattcaaacctccacactaggcttaagtttttagtctttcagtggatctgactgctggtgttctctcttagcagaacctgaagctctggcacccagaccttactctgatatgtgggggtcatgttgccttcacgttgcctgtcccccaaagcatgcaccaggctacagcagaggactctgaagggctggtcttgttctctggttcctccttttctttagttctctttcttcgatcgtgaagtctgattcccttgaaggttgtctgatctggcccactgtttattctctcagctgtagcttccgcaacctggctcattatctttgctggtgtcctggcccattgggcagcttgccccttccttgccaatccctgactatataagctgctggcctcctctgaaccctgccctccttctgcaaactgccattcttcctatagacttagctcaaggaccacctcctcagtgaagcctttcttgtttagttagcactctctggccctgggcatccctcattagcatttgccctggtatcttaaagttgttaacttgtttgttacacctgctaagccccggggttttgaatgaaggagtagtctctgtggttggtttttggcatctttgaactgtttggcctgaagaagcaactcattaagtaagtgagcatgtagttcagacgtgcagacaaaacagccatacacacaaaataaaaatgaagggaattttaaaatgcagaagtgtgtgcagaatggacagcctgagagatgcaggcagagtctttgaagctctctgcatcctgccctcccaagaccacgctcagaacaactgggcagggtgattacaaatccatgggaaataatttactactaaacaaagcaacacagcggctccacaaatctcccaaatgcaagttagggcctccctctgctcagtcctggggtaccccaggaaagagcaacaggcttatatgtggggagctcaggaactggagcctcctcacaccccagtggccaaggcttgtgggagcccatggaggggctgggttaggcgggagccacaggtcagtgtggggaccgagttgtcaaggctttctctagtggcagggtctctctagggacagcttgtggaaacaataggaaatcaacagtgacaacagccactggaagaggaaggtgccaaaccattagaggcataccagagagggcggcagcccagaggcaacagcctagggggtcagaaaagcagctatgtaccgtactgactttaaaatgccaggaaagtgaattcctcatagaaaggagcaacccaaaggcatcagtgtgagagtccatctctctctctctctctctctctctctctctctctctctctctctctctcacacacacacacacacacacacacacacacacacacactaggttctgtagcagaggactgtgaactaggtgactctgcatagtaggtgtgcataatctcccactatgtgtttgccactctctgcttcatctgacccagggcatcctcttcccggaggggaatggctgtctctgcagtcttcggtggcttgcttgctgcctttggcgttccttggcttacagtcacgcccctccagctcttcctgtcccatcaaacagcattggcctcctgtgtcgttgtcttgtcacaggcctcttttcaaagtcaaaacactaaaaaggaacaagttagaaaagaaaaaatatatataaataaaaagagagggttggagagatggcttagcagttaaaagcactgactgctcttctagaggtcatgagttcaaatcccagcaaccacatggtggttcacaacctctctaatgaaatctgataccctcttctggtgtgtctgaagaaagctacagtgtatttataataaataaataaattgattagttaatcaattaataaacaaatcttaaataaaagaaaatatgaattaaaagagaaagaacataaatgtcctggttagcaccatcaacctgacacagtctagaatcactggggaaaagtttcagttgagtaattgtccttatcaggttagtctgtgataaaggagggcctaacccactgtgggcaggactattccctaggcaggtggtccttggctgtataagaaaaatggctgaacaggagcctgtgagtgaaccagcaagtagcatccccctggttcctgccttgagttaacttgctccacccaagtcactttgggtcataatgttatatatgttcacagtaacaaagaagcaaagcactacaagaggaaagtcttaaggaaaagtaacaaatgctcaaggtatacaaagcaagtccagcctgcagataagggcatcgccgaaagtatgcagtacaggtccaggcttcggataacagggagctctgaaggtatgcagagaaggtccaacgtgtagacagtaggcatctcagaatcctggttcttagaaaaaaatgtctgtggtaacctaaacggggaaaaccagtcagtactataagtgacaactgaagggggaaaaagccacataattaaaaattaaaaataaactttgaaaatccccgtaggaagaacacaccacagcattggcctcctgtgtctttgtcttgtcacaggcctcttttcaaagtcaaaacactaaaaaggaacaagttagaaaagaaaaatatatatatataaataaaaagagagggttggagagatggcttagcagttaaaagcactgactgctcttctagaggtcatgagttcaaatcccagcaaccacatggtggttcacaacctctgattacctcagaacaaccaacacagagatagtcttgtaaaattattggggggcgagggaggtgaggaacctatggatacctaaggaaaaaacacaagtcactctctgatggttaattctgattaacaccttggttgaattaagaagcacctctagcattaatgaggtaggtctttggggtcacgtgagaggcttaactgaggaggaagccacaccctgaatgtgggtggtaccgtctcaccctctggagttggaagtaagacaggagaaaggcagcagaggtccggcattcctctttctctttcctgatctacccagatgtgtcagccgccttagctcctgtgtccacagctgggagccactcctattatcaagcctgccccaccttgatggactgtagcctcagacgctggacccacatgctacgcccaacttccctcaagtcacttcttgtttggtatttgctcccagcattgagaaagtaatgcacacctctctcatctagtggccattctagctcgccctgagagagtgcgccaacgccatgtttagaaatcaagtagcattaaacagggaaacagcgtcattaggttgttcaaatggaagaactggctagtttggtggaagagcttggaatgaaggtgtcttaaacccatcaatcaactgatgagggtcacaccccctttcagttggccttatcccagtggtcacccctgtagcttagacggtgcagagctaacaagagtccactcagccactagagggcacacttgcgctccagacctgctaaatcacctctatacttgtgcctaggcaacgagtatttgaatgtaggtccctgcatggaatatttttgttgctgtttatttatttaaataactattgtggatttttgtgtttgtttatttttttaatctatgaggggagttgaagagatggctcactcactagctgtacttcaaaaggaaccagcttataactgtctgtaactgcagttccaggagccctcttctggcttcggtgggtactgcatggacatggtgtatagacatacatgcaggcaaaacacccatacacacaaaattaaaatgaagaaaaaatgaaataaactagtggggattaggttaaggcaactggtttcagagaaccaggagtttggagtcttgatgtttgtatattattttgacaagccacgaagtagttgtgtgagaatcagccatttgaatgccatcagcaaatgatttgtgttgtcttagggattttcacctattaaagtccatggtcaggatttagagttctgcatctctgacttaaacatttcttttcttggataaatgtgatttcaactcaggaccttttttctcttcctgtttttagatatctaattctatagattctaatttctaactccatctagacatggaaatcaggttttttgctttttcactgttttgtaaaataaagcagtaagtaaatctttctagacagaaatccttcatctagttcacttgtggactcaagcaaattctggaacaagcaagtcctttggaagagctctaaagtgtgtgtgtgtgtgtgtgtgtgtgtgtgtgtgtatgagactgcatgtgtgtgtgcatgcgtgtgcatgtatatgtgtgtgactgcatgtgtgtatgcgtgtacatgtgtgtgcacacatgtgtgcatgtgtgtgcatgtgcatgttcgtgcatgtatatgtgtgtgactgtgtgtgtgtgatcacatgcatgtgtattcatgtgcgtatcagagcttttttaaagatttgtttttattttttttatttatgcatgtgtgtgcatacatatgtatgtacatttgggtgtctgaataggccagaagaaagttgttggattccggggagctagagttacagatgcctgtgtgtcatacagcatggatcctgggaactgaaccctgattctctggaagagcatcaaatactcttaactcttgagtcatctccacatccccgaatatcagatttttgacattttatgtcagatgaaaatgaagcgatgtatttaggacaattaggaaatgcaagccggggattttatacccagcaaaactgaccaagagtgtgcactgttatgaacttgcacacactgaacaatgactttggcattaaggctacataacctattaaagggaagctggatgctatcaattgccatatagctcagactacacagatgtagtatttctagttaaaccgaatagaaggaaaacatactagagagattattatggttgattggtgatgatcattttagtactgttactctgtgtgaaacatgggaccagtcaaattggacaattgtgagattctcagtgtcagttgaatccggcttgtgacgtagagtaaaaactatatccttgagccctggagaagataagaagtttataaactttgttttgaattgtaaatattagtgtgagcttgcattacatttatttctcattgcatttatttagaggggggtcaaaaggcaacatgtaaaagctggtttttccctctttctgtcacctagatcccaaggaccaaactcatgttatcagctttggtagctggctgaggcatgtcatcagcccctccttcgctgtatgttatgtttttaatgtctgctggcgatgcctggaaatagtggccagccctgttgctctgggcattgtcactgagtactatgatcctgtatcaacatttcccgtagaccacagacagataaatccagagctcactgtactggctctagtgtacactaaagcattcttgatgaaattgagtactgtgtattgcctcagctgtgggagtacaagagtcccagagcgacttttttttctctctggccaagaatagaaggaaagtttgagcttccacaaaggacagcaatgccagtggaccaaacctcatcaaactggatcccatcatgagttctccctggctttatttttcctacctcaaagtcattttgaggagtaatagagagccctgatgttcatgatacaaacacttgtctgtattcattacttttcttaaagtcctaacaacaagaagcaacttagtggaagatagggtgtttgtctcacgtatgagggtacagtccatgcgagtgtgctgggggcaggtgcagctcttggttgtggtaggaaagtgaagcaacaggtgcgtttcctgggagtttagaaaacaggacaggaagtgggccagcctataaatctcaagattctacttataacccacttcccctcactggacctccatctcccaaaggattcttaacctctcaaaacagcgccaccagctggggaccaactgttctgacttgagagcctgagggggagcctttcacatccagtgttcatattcatgtttatcacgtcatatttatatcatggccaacataacactggccagtagcagagtagagttggacctagcaaatattgaactatatgcttctgggtgaccacacagcagtagcatctatgagatcgcttccaggcacagaaggccaaccagtgaatgagaggaaagtgtcaggccagcagggtttttccagccccaaggtacagtcagtgggtggcttgggtttctgtcgctgcgataaacaccatgagcaaaagaaatctgcgaagaagagggtttatttaaccttaacaggttatagtctatcatgaagagaagtcagggcaggaacccaaggcaggaactgaagcagaagccatggaggagtgctgctttttggcaattatctatctatctatctatctatctatctatctatccatccacacatccacccacccacctacctatctctatctccatgactttctcagcttgctttcttatattacccaagaccagccgtgcctggtggtgcacacttttaatcccagccctcaagaggcagaggcagaagcagttggctctctgagttcaaggctgacctagtctgcatactgagttctgggacagccagggctatgtagaggaaacttgtttcaaacaagcaaacaaacaaacaaaacccacaaaacattatgtcacccaggaccacttacccaggggtgctacaacccatagcgggctgagccctcccactcgtcaatcatgtatcaagaaaacacctcatagacttgcctacaggccaatctggcagcgccattttctctattgagattccttcttcccagatgactctagctagtgtcaagatgacagaaactaactaggagaatgggtgtagacgctgagcaccaactgctgtaggtatcacagaaagaccagaatgatctgatgggagagactccacctctgtcatccttccaaccagactgggcctgtgtctaatccagcacccaacataaaggacattcagaggacagagggatgcaggcagccagctcctgactatgggactccgaggctgaaacgcagtagggtccttaccagatcacgtggagaataaaaggatggaggggaaactgtcagtcagaggggactgacagacaaccatcactcactcatgggcatgcccatatgtctgtcacagaggtacacactgtgggaaggagctgtgaagaaaccgagcaggggcttgcgtgggcccaggttaagggctaactgtaggatatgggcgtgttggtgttgatctagtgcacacgaggcagcttcaggcagttggctgaggtttctttccttgtgtgaagaatgtttattttttgagacagggtttcactgtagagagcaggctggccttgaacttgtaacccttctgcctcaactccctgatgagactgatgattataaaaatgttttccatacaataactcttcgaactatttgcattccgttcatatctggggttttgttttgttttgtggggtttgtttttatttcttctttgtttgtttgtttggttggttagttagttgattggttggttggttattagagacagggtttctctgtgtagtcttggctgtcctggaactcactatgcaaacaaggctggcctcgaatgcagagattcaccttcctctgcctcctgagtgctggggttaaacacttgtgccgccaccacctgcctgctcatatgtttttatttcatttatttcgtgtgtgtgtgtatgtgtatgtatatgtgtcctatggagaccagatgacaactttgggtgttgtttcacagacactgcccttctcctcctcttcctcctcctcttcttcctgcttttttagttttaatttaattctatgtcgataggtgttttgcatgtgtgtatgtatgtacagacaccatgtgtgtacagtgcccacagaggccagagagtgttcgatcccctggctcttgcattacaaatggctgtgaaccagctgccttgtggattgtccgaaagagcaaacagtgctcttaactgatgagcaaccttgttttgtatttcatggtaaagtttgtaagagcagtgtagcatagtgccaggaacacgggcatggactcacagtaaacataacccttttccttcctgtcacttggtatggattcaactcctctgtgatggaccctgaggtcagcagcttatatacatctctccaaccctgcccccaaccctcaaccctgtccctgtctccaccatgagctatctacccagttgttggcttccaggatgaaagacttgacacccttattcactggtatccacggcacctggtacccctagctactcaacattgttgctgagcaactgagaagtgaacatgtttaccaggggcagactgatgctcgcttagtgcgttggcaaattccaaactgtgcacattggcagctaggctaaatggtgtccccattttatatgaagggccatgcacagatccatacagtttagcctggccacagaggccgctgttaggtgctgatagaagtgcccctggaccacgtgctacttctggtgttccctgggtgctgttgtcctggctttgccaccaaccttcctggcctgtgtttctctgcagcttccgccaagagaaaacagacaccgtccgctgcatcaagtcttgccgtcccaacgatgaggcctgcgtgcgggaccctgtacataccgtctcccacaccgtcatctcgctgcccacctttcgagagttcacccgtcctgagggtgagtggatcaagttcaaggtcctgggacttgcttctgagcctccttctgattgaacagaaagcctgtcttgcaggaacccttccttgtaggatgtggtcggggtaggatgcacatctttcccatctgggatcctgggctgctcagcctttccctgttgggcagcccctctgatggctgacacgcattctgacaatagcattcagtgttgattccatgctgaacgctggcgagttgaggaatacttcctgagggaagtgggtaggaggttattggccaaagagggagagggagagaagagagacttgccagtagatcacagttggcaaggtctggaggtgagctgagcagtgtgggcattgagaaccaagacagactgacaggactggaaggatgagccggcgcctaaacctggagctgaggcttcaccccaagagagctgttgagaggttctcatagataagtctggggtgccaagacatctcggagactgggacagatggatggagtagccagactggaagcagagggccataagataacgtgacatgttccttcctgtgtccatgtcccaaaggacatggctggtgccatcacagcccatttctgaggcagcctggagttacaaacttctaggtgaagcacatactcatgacacaccctggggtgtgtagctgtgggcttctctggtccccagtcaccttctctcttctgcatggagtctccttccctgactatcagcagacatgcagcgagcttgtgcgccagcttacatactaagaacatgccaagaaaagctcttcctctccaggaaaatgtgtcgctgagttatccaagatgacccctggcctgacactgtgaaagtgtcatgcaggatcaccagacggtgggggaaacgtgtgagagccaccaggccagcactgtccttggggaagtccccagcccctactccattcccactggctcatgtttccagagaagtcactcatatttgccctgtgtcgaggggggttttacagacccgcacacaagtctttcccatgttcccagcagccatttttttgtttttagatttatttatcttatgtttatatgagtatacggtagctgtcttcagacacatcagaagaggacagccgatcccattcagatggttgccaagagccaccatgtggttgctgggaattgaactcatgacctttggaagagcagtcaatgctcttaactgctgtgccatccctcccccagcagccattttcctggtgttccactctgctgacataggagtttgttacctgaatggggggcagccaagacacctgttgatgtcttgggctcaggacactagggtactcagtggacatcagccagcttcctcccttactttatagatgaggaaaccgaggcccagaaaaaaaaggacatttcctagtttaccctgagccaggttgggatctgaatggtggttccaaggctaaggtggcttacactgcttcaccatgaggtaatctggaaccacatccaccacagcccagctgagtccacgctgccagctggccccatgacctcagggcagataagaattgtcaaactgcctcagtttccccactgatgaaacagattggctatgatgtgagggctaggactctacccttccacacaggggagggggttggtgatttcagccatgttgccttaggagtgaatcctcgttgtgtttgggtcgaggaagggggggcaagtctctggggaggaggggggtggagtggagtggagtggagtggagtggagtggagtggagggctgcgccagtgctacagtgttctcatgccatcatccttgctgcagagatcatctttctgagggctgtcacaccgctgtaccccgccaaccaggccgacatcatcttcgacatcacagaagggaaccttcgagactcctttgatatcatcaagcgctatgaggacggcatgactgtgggtgagtgacccttgagatgcccagggcattgaccaaggtcatctgcaccctcctcactcccatcagaggccagttctacctggctgccaggtcctagccagcagctcctactcaatcaagtctggggagcctagtgtgaaagactcccccggggatccaccccggccgtaccactgactctcctgtaaactctgtcagcctcagtcttcccacttaccaagtaggtgggcaaaatagatcctgcctctcatagctggatttagaaggccgtgccccagccaggctgtaagccttgctcagtgggagctggtctgtctgctgttcccatggcgccgtgagaagataagcaaactggacttcagaagaccccatatctagtcccagccatgcaactaactaccttggcttagtgtgcaatctccagccacttgtcacccctccccaggtgtcagtgggtaagaaccccccaggacagtcggtgtcccagaagcacaaaggaggcagggacagagcaaccttctgtgttggtttcatgtgggcttggtgaagaggaagtggagaggattcgccagacaccgggacaggggctggtaaacacccacaggggagatgggagggaagcctggaagccacacggtctctgtagagaggactgtggtccctgttgctgtctgtgggccttcagtaggacctgctcgccctgaacgctctcagaggccatttccatatctgctgttctcagctaaattgctcctggagtggactaagctgggaagctgggcagagttgagtcttggtatgatgtcaccaatgcccggtgggtcatgactgcacccagcgggtcattccactttgtgacctttgtcacagtagctcatcagaacggtctttttttttttaaggtttatttatttatttattatatgtaagtacactgtagctgtcttcagacactccagaagaaggagtcagatcacgttacagatggttgtgagccaccatgtggttgctgggatttgaactcaggaccttcggaagagcagttggtgttcttaaccactgagccgtctcaccggcccccagatggtctttaagtaacttattattattgttagtagtagtactgatttatttattttatttatatgataaataaatcactgtagctatcttcagacacactagaagagggcatcagatcccgttacagatcgttgtgagcctccaagtggtttctggaaattgaactcaggacctctgagagcagtgagtcctcttaactgctgagccatctctccagtgctttaagtaacttttattcatggtgatggaaaacggtcttatctgccacttctgacttagatttacactctgaacattttgaagcatttgagaaactgggtgataatcccccccccccccccccacacacacacacacagacacacacacacatacatcagtttttccttttattctagtctcaggcctgtgagatctggattggagccgaaccatgagtttggcctccaggtggcgctgttggatctccaaaacctccatccaggctgtttcttcaaccccgacagttgctaaactggcagctagagaaagggaatcgttattctcctgttgccaaagagccatttatagcaactttacaagctcttaaatgggtttgcatgttgtaaacatggctgagtcatttgggggctcaccacccccggcctcctcctccgctgtttggcagcaaggataattagttaattacaattaatggttcagcagccctctctgagattccaaggagagggcatgcagcccggccgccagccgtcctaagtctcaccttcagctatggatgaggggaggtgttgtgtctatgtcgggggtcgggtgggggtgtggtaacggtttgtcctgcttcaagtgtggatgagagatgagtaccctgtcattggccagcagaagccccctagagcttgccctgtgagtgacctattgctatcatgtgacacagcctgggccgctgtgattataaccgtagaaccttccagtttgcttgctctctgttacttctgaacacttgagttactggccctggctgacctgtgtttatagagatagatactgccccccactcccatgctcacctttccccagaagagagcactgggccatcaatatactgagatgtgagcctgcagggttgcatcgagcctccgtagcccaccccagctctctcaggaacgggccctccctctttccacatctcttctcagctaaatcgttcctggagtggtctaaagctgggaaactgggcagagatgagtcccagtgagcgggtcatggctgcaccccagacagaacagtcttgggtgcgtctgctttttggcttcctgtctgctacatcagaaagtcctgcttgtgatagagccagaaggcctcatctttcccagccacttccacagaagaagaaacaaaggccacttgtgtgtcagtcttagtcttttcttagtgattccggggcccagctggccatgagatggctccaggggtgacgagtgaccacaggtaacctgcaggcagtgggcggctcgggaatggaatgcagccgaggccgtggggaatgagcgtccccctcgccgcgcctggtcatgggtgccctgatctttggaattctaggcttgggcggcatgggggtggaaccccagcccttcggaaattcctggggctcatctctctgccgactgagtggcccagcctttttccactcctcagcaagttcgcagggcgttccatctggtgcacacatcacctgccgggtggagagggagaccaggtggggccggttgccctgagtggggacgaaggctgtgtttgtgattgggttctgctttccgacttcttgtcttaggctcccagttctctgcttggaacatttaccctgagattgcctatagccaaattccttctcccttttctgcccagaaacatctctgtgtacctggaaatgtccctcccagaagtaaaccgcccccgcccccccccccaacatggctccagtcctgaccactgtggggatagagttttctgagttttggcccaacataaagcaactctggagcttagcagtcatggcttcttgccaccactgcacactctcgcccccgtgttcttgttcagtccttgcaaatgtgactcctgggaacaggtcaggaagctccccttgggcaaaggagggaatagagtccaatgaccttgtaagactatgcaaccacaaaccatggggctgggtatcttccgacacttcaggctacactttatgcaatacccccaaggcttggccatcagcaaaagcatggttcaggactaagtgggcctgccacctgctgttcccatccaagctcaagaggttcctgtgtctctggcaatggacatgggcctgtatatggtcatgccggggcacctgcctgctcactgggctggatgaatacctgcctgtcgaagccacaacccttgtggacactccctacaaagggcttccctagagaggcaaggcccaaggatagtctcctcacatactcaggagcctcaatgagtatagcattcaggaaccagccttcagtccctgggacatagagaaattatcttcactcaggggtgggggagcaagggcgagcaatggagtagaaatagcacaaacctaggcctacccagacctagaacccatagacggacgcccagtgctggcatggacagagttctccaaatctggaagtcccacaaaataagcagccgatgatgagcctttgacccctgtggccatggcattcaggcccttgaaagtgacaagacagtgaagtgcttgagagagaagtggggagggaggtggggggaggggcgactaaaaaggccaggcttcctctaatgtagcctgttgggttttaggggatcagggagatgctgctcagggcggagctgaagcctctgcaaggggggggggtgcacattcctctctctccagctgtcagggagacttgagggatactcctccggcctgtggctctataaatgcctggggcgtgcttgggccaccacagagcctcccagtctcctcaggagtgcacacttcactctgcagagccgaggctgcagtcagggtgctttgagaagctgaatagagcgagtaatgggggagccctggccacgaaaattgtgggccactcactgtcagcctgagccctgtctgagcctctagggtttagaggatacctggaccctgggcctctctttagcttgcctccacgaaacttctcaacttcattttttctagaagtgaaaaaatagagtctatctagaatgaggtgtcaactttgccagaatttgtaccaaagccttacccaagccaagaggatctgccaagagaagctgagaacactcagccgtacatttttatctgctgtttgtggggtttttttctttctttttggcctgtggcctaattttgcattgccatcctgactccacaccccatcatcctccacaggacccttagatgcttaaaagatcgcctaatagttatctatagacagctgtgatggtactgatggtaacagtggagcacacaaggcaggcttctcggaggaggtcacacaactgtcaggtgggaggtgtaggaggactactttagacccaaggccagtccacttcacagtcacttcatcgacccctatgaggtgaccatgaagcccatttcttggcagtatatacccagtgatgtctatcctactgacatctgccaataccagtaggtctgggtcctatataaatagtcttggaattctggatccaacctgacagttaggagtaaagaccttctgagatccgtgggaccaggagatggggttcactgggacaggatactgaagcacccacaattctccacctggctagtacccatgagtctctgctgtagcaggtgctatacccgggcttgtggggacactcagcatcataccctcctgcccacccacccccatctgcccatggactggcaggccagcctccagggccacagtgcctgagcagttaattctagggttgggaacttaggttgcggtcggtgtcacgagtgatccaggaaggttatctgaaagttgagcagaaccctcccaggctggagacagctctggttggctgctgtgaccaccctctctgcactttacactcatttctgggcaagtcccaaggtctgacttggcatgtgtgcagggccgggtagcgggccgagagcagcgatgattgtgtacgaggagggaggccgaatgtgtggatgcacatgttgcttgattcctgattggttccctgctctgcttatgggcggcttaccatgtagtagtatagcatcagggctgggcctcaagaccctagtgccacctcaggtgcaggcatagggttaggagactttgccaagttttgctcaggagtcacctgatgtcaggaactgtcacccagcctctgcactgaactccttcatcagtacagcctcgaggatgatagccacttggaactgatatggttgtttgcagaggaaaaatgggtcctctggccagctagaattcaagcctgtaggtctgttctctggtgtcctcaagctccttagccgcaagatggctttggggacacagcttctaggtatccctggggagaagaagggtggcctccttagtcccacgcatgggcgtggctggccaagccccatgtagctgggaaagttggaatgcaagacgaaaagatgggctggctcgatttgggcactgttgctgagttaggttgggaaagagataccctgattacagagtccctctcaccatgacccagaaagggatttgtgagcgaggcctttgcgtgtcgggtgcgtagaggacaacagaagtccagtggtgatgctcagatgctgtgagtcccagggtctctggtgtcacgtctgagagtggctatccatgccagatctggttggggtggaagcaggtccaagtttgtggtcaggtgagacacaggaggaacatagctgagcccaggaaggagcaggtagagtcgatccctcacagactccagagaagagatggtgtctcacgggaccagcagcagagcagtgcttttgacacacacattcagctaacctgaagagtagggttagggagctatctgggccagagcctttgttgaagtccatgggtgtgcctgatacgtatagatcaagcaggcatgagcccccacgatgtcaccttgtgatgaaagggtcatcatgaaggcctatctgcacagtgcatgtagcctgtctgtctgacagggagatgtccctaagaagaaaaccacctgaatggcccacactgaggcttgggaggggtacagaactggagaccctgtccaaggatccttgagcccccctggtgagaaatggtccagccagtattcaaaagtagacactgatcttaaatatgaaaaagtattccatgtttccgacatcacccgggcacaagtgctcatattagaggtatgatccactatgccccgccccacaccccctcttaaaggtcacggaaatacttttcattctgaactagtatttaaagtctcatccgtgggtgcacagggcacaggtctcatcaactgcacttgatcttagccaaaaggccgagaagcgataactgacgcatactgtttagaaaataccaagggctggtttgcttcttttaggatcatgtacagttgatttcaaaaggccctaatacgagctgttccaggcttgatttgtgggtcttcgcttccggttttgaagacttcagtctgatcacacacattctctgttttcatctcagaatatcaacacagtagttcttgcctcgtgggaccgtaaggatcaaggtgatgtgtgtatttaagcacagggttagagtactgcctgcgagggctgtgaacaaataactccttggggaagctcagagcacccttgggtggcagtacacacgtggtttaatggggtagtgtggggctgttcactccagttcactgcctgggagctgtttaacaggcctgtcctatagcctgggctggtgagtctgacctggcctacagcaaagtggagggcatgtctcccatgtcctgccaatcttgaattatcttactcatcccacaagggtaggtgtgaccctgccctgtgccaggccctgcaccgatgtctgggaagcagctccactcacatgctttcaaaacactgcctgccagcttctctagcacgcatctgttgggtttccacggctgaaggtggttggttttcagaagctggctacatatctcaaaagggtaagagtcatatgtgtcaggactgccacgggcagttgaacgtgttatgcattacagaaccctaggtaatgccactcctagcttcgtctgtacgcagtgtacacctatacaccgtggccccagaatagagccagaagaactcactcaagacttaaggtctctttggcatcaattcctcattgttggccatgctaggaggatctgaactgcctctctaaactattacctcctaaggggttaaatatgagagactgaccctgccctgaaatccaatttggcaggtttggcctgggatcagtgggcactgcaaacgacattcagaaactccacctaaaacaacagcgcagccatccctgcccagcgaggagtgattggccctgtcctggctttcacggcaaatcccagggattaggcgccttctcttctccgggaggcacagccctgtcacccggggccacaccctggccagcagccaacttgcttcccgggtgaggggcccagcctcctcctcctcagtctgggatgggccagggcttgactctgccacgaggcaggcgggaggtgcaggcagggcagggggcggggaggtgcatctctcacagagggccagacagaagggtaagaagaggacagacagcttttgtgctccttgggggtggggggcaggcgtggagcaaagttaggatctactactcattgcctaagatctctcagcaccacagaagatggcccgcccccaagctcacagatgcagatgatgctcaaaggtctcttaaacatgagacctacactcccaacccacaggcatgggtatggggaagagctcggtgggggcatgatctctgctaggggcctactgaggtggtgtgaaagggccatgaagaacagccaagagtcccagcccttgcccaggtgactccaaatgccccctgggattcttctgcgtgtggcctgagcggttgcccaatggtgacagtgttgccttccctgctaggacagctctgggaccccttaggcccatagcctagcctagctgatggccagcagccccctgcagccaccgcttcaaaagaggaacagatgatatgatggggtgccctacccaagctaagcactaaatatgccatcgcccagttacaagagctatggagttgaaactgtgtgggtggaactgtcccagttcctaagggagctagaccaggatgatgcctgcctcactcctgggcaatggtgatcattaaggttagactggaagactggcctggcaagtgtctgaaaagttcatcctctgagctcacttggtccttgtagagatgtacctaagtacctggggactgtaaactgcaggtacatgagtctaggatgtccgtccaaacagatgacgggcacaggtcttgagaaggtatctctcgcagagtcggtgaggaggcataaaggagcatccatctgatccccttacccatcccagagtgaggcccgatgatgcctgtagatgaatggcagcacagcctgcaggtgggccatgtgtgcacagtgctgggacaggactctgaacaagccagatgtgaaccctgggagccttaggatactgctctgcccaccagagtcctcctgtgctcatggctgctggtgcatgcctcctgccctggagctgcctcccagacagtgagtctccatcaccttgccatgctgtggcctggcagtactgcagagctcaggacatgtttgaggagtgcccttgcctgctgtggttgaaagagctcagcttctactcttcaaggtagaacctgagacccactgggtggcccccttcctgctgacctggccagtgttaactttgtctctccctgctgcttgcctggagggatatctgcagcccagatctgctgttcctttctgctccgctcctcagggaacagagagcatatggtatagtctttctgtcttgatcactgtagagttaaacagcacctggctggaaacccaggctttaggctgggtgatgcccactggcctctccagccctgcctctcacaaatgttaacttttactcttgggcccaccccagccagctgtacccaccccaaacacaaaccatcctctctccacctctttttcctcttagtaagctattcatcttttacagcccacctcaggctgttctctgggacacagttgggaataaggcggtccgagggagggacagatgtgcctcctgcattgtacactttttttttttttgcattgtacagtttttatctcactgcaaagagtatgatacagtctggtggtgaccagaacttcagaaagggaggtgacataggaacagggaggatataccacttcaaatatgaatactggggacacttggcaaagacagcaaagcccaggaaatgagcctcaggcaagctggaggaagagcactggacgctgagagaacagcccacacagagccctaaggcgcatgggctcgctgtgcagagttgcagctaaaacaaaggaagaatgagatgggacctcgggaccttggagccacagggaagtctttgctgtgaattcccactgatcaatgcaggaagctcacacagagagaggctcctctaggtgcctcctgggatggctgtcaccgtcctccgggaggccaagatgatagtggctctaaccattggggtctggtaggaagggtaggtgtggacagatagcgatatggtcgggctagcaggtcatatttgctgatgggccagtggggactcgggtttgatggcaggtatctggttctagcagctgtgagcagtggtgtggtaacaggaagtataaggttatgaactgttcgttcagacattgagtctaaaatgtttgtcaaacaccctcagagatgtgactagaatcatgggctggattcctccagaagggaaggtagttaggaactcagagagtggatgaggtcattagcatggtgagaggagagacaaagaagggcccagactggatacaagtcaagatggtcagaggtcacagagaagagaaataaccggcaacagggtcagggtaagggcctggaacacgggaagggctgctaagctgtcctgctgagactcaggatagatgagaccatagatccatcattgggttgcccccccccgacttgtttcttgagcacacacatatatgtacatgggtacaaatatgcacaaaaatatctactaggaggtaccaagccctcacacccatcaggtgtccagaaccactggagtgccctgctactagactaaccttctagacagtggggatgaatgggctacaaactccagtggaaacaagggcctgtgtggaggagagaactctgataataagaattttggtgatgagtgagcccggggttggaagaaagtatcaactgagagccagaaccactccaagttcctggccctgggaagccaggtagggctttcttgtcatatgactgttaggtcttaaatttgggacaaatgactgaagtgctcattaacagatcaaactggacttggctgtcagattctccgagcatctccaatccctgcctgttacaaggtcttcctagctgtcacaccctgccccctaccctaaccatctccagtccagggcctaggctgcccttctctatatagccctaccactttggttacctaaccatttcatctaccgtggtctcttggactagctctcctctttcctcgcccctctgtcctcccgtgtctcaaggtcatgtccactttggcctctcccagacgttcccgccgctggctatgctgactttcatatctacagtaaaccttcttctccaccatatctaggagcggtcatgtcctttccctttctgatttctttcattcattcagtgacaaaatccttgagagaaacaggagagatttcctttctgccctccattctcaagggcacgggtcatcgtgacagagaggacactgtggattagctcatctcatggcagctaggaagcagaggacaggcagggagcacccattctgcctttcaccctttaccccctttatgtctgggttcccatcctgcaggtggccccacccatctcagggaaacttagaggtgtgcttctccgtctcctgggtgattgtacatcagttaagtgtggagattgacaaccacggggaggaaggagagaggtcctggagagggtgggttagggttcagtatgtttggggccacctgtacatggttggggttgaggttgggaggatcctgcaggtaggtgaggagcgctagggtcaaggcagggacataggaaaggaaaaggacccagcaccttgctccccccagtacaattaggagcacatccttccagagtattctccaaacctttcttgcctttcttttgttaaagccacacggctcgggggaggaaggcacagcggcacaggttctggagtcctggtttgtgtcttcctagccgtgtaaccttcagggagtaacttagccagcctgagttgtatttcctcccacaacaaaccacagaaaactgtagtgctggctccagtcacaaccagcagtccttagcgtgtgtgagcccagtgctgcagaaaagccggttccgcgtctcagatgtgggtcagggaggtgtagagccaagctggatctcttggcatttctctgcgtttctcgccagggcagctgcaccctggactttaccccctccacttggctgcctgcaggtgtctgcttgatgcatctgcttttgctcactggagacttggggcggggtccatttataataatcccaaaatatggctgatgagttttgctgaaacatgctgagtgacatttggtattctaactatgcagcgtagacacctgtcctcctgcctttccggccattagggggtttctcgggcaagcagggaaggcagggtgtggggagttgagacacagccctaattcctgctgtgctggctctaaaattccagatacttctgccgagttcactgaatgattttttttttaaaaaaaagaactatttattttgttctgtgtgtttgagtgttttgcctgcatatatgtctgtgcactgtgtgcatacctggtgttcacagaggtgtctgaagagggtgttacatgccctgacactagaactatggttgtgagccaccatgtgggttcagggaaccaaaaccccagtctctgaaagagcagcaagtggccttaaccactgagccatccctccagccccttgctggagtatttttgagtcaggcccgggcaggatacagtagaagcatccatgggttgtgtcacatagtgagctgagctttggcatcagtcctgcctggcctgggactcgtggccctggtagctggaatttgggacttgttactctcagagcttcacctttggcccctccctcctcatggatgaagctggtcatcttcatagatcaatggtggggaccagattcagcctggccactgggggtcttccccacccctgccctgcaggctcttcccccacccaactgcaccctagtcgtgtgtaggttcaagtcaagcattccttaccttccccccccccattaccaaatgcttcaaaggctgaaactgtatgggtgtctgagaccacgagaagaatatcccacatggtaaaactcaccttcctctgcaacattcggaagaatactgcatacatatctgtgtatgtgtagaaggcagttatgaaacaaatgaacgtcacgttcagatgtagggtccttcccggcttcatctgcaacattatgctgcacctcaggacacgtgtgtgcagacatcccaaagtccccatcacccaggccccgtgggttcaggacactgagccaacagtatcccctccttgacttaagctccttgttatggctcatactacctgtcatagcctgtggttctgatactgggaggtttggtgaatctggtgacaccatctttccagtgtctggcatgggggggggcggggaggtggccaccaaggccagacagagagcccaacacttcctaactgcccattctcctcccaggtggtcaccatctgaaatgtcaacgctttgggctgttggtcactagcaatattttcccactttatacattacatccaatgcttgacctctatggttcatgcattcagcagccattcattgagtaaaccaggcactgagaggccccaagaaccaggcatgcaggactaaccatgccttggctttacgctaaatgtactccacccctagtctggctgcagggagggatagtttcttactctctgcttggtgatgacacatagctttcagactgtcacatgtgcctttccccactcaagccgctgtctgtccccttgcatcacacgcagtgtcttgattcatcaccttgttagttgaaatactctgacagccaggtccactccattacaccctgtcagttcaaatcacggtgcttttgtgtcagaagctgaacacatgaggcgttgcataagatcacacaactggccagcacagaggcagcccaagaaccagagggtatgactccagctatctggatagaatgtttgaaagccagtcaggtgtgtggagagcccagccgattttatgttgtttcacgcagttgataggcaactgaatacattacatggaaggaggttggatgggcacaggggtgagtgtgagaagcaccagtcccaggagacagacatcccctcctggacctgtggactttgtattcaggatcaaaaatcccagaacatcagcttcaggttacacagcagagccagagacatgaaggtgagctgccccagggggctacatttttcaatgggggaaaaacaggcttaattatatctctaagaggtacagacgcgctgaggaggaataccagaagcgcctgggacctggagcagaaatgcctaagatgaggatttagaaggttaaagctattgaattcggtagcactatgcctgtgtgtgtgtgtgtgtgtgtgtgtgtgtgtgtgtgtgtgagtgtgtgtgtgctcgtgggcatgcgcgcatggtcatgtgtgtgtggttacacatgtgaatacaggtatatacatgtgtggtgtataggtgcatgcatgcacagtgtatgtgaggatgtcagaggataatcttgactgttggtccttaggcaccgtctaccttttgttcaacattggcctgggatgttgctgagtaggttaggctagctggccattgagctccagggatccacctgtctgccctgcatctgccttcaccaggattacagtgcacaacatcaccacacgtggacccttacgtgaatgctgaggctcctaactgaggtcctgattgcaaggcaagcactgtacccaatgaaccatctgtccaggtcctctttcccttttgccagagcctttgaaaaggttggaacacccctccagatgggacgggcatgtcaggctagatggaaatgggctgcttgctgctacacgtgtcagtcaaagaaatatgcccttagccaaagccttctgtagctcttgttaaattttgtacaatatattttgtttctaaaattttctcttccccagctctttccagattcttcccacctccctacccacccaacttcatgttctttctgtctccctctctctctctctcaaaaaaatatcatcaaaccattacaacaaaacacacagagaagaaaccatggagtccgttctgtgcttgtcagctgctcctaagcatgtggcctgccctggaatgggggttgatctacccagtagccttttattggagaaaacagactttccctcccatcagggatcagttgcaaataggttgactaggggtggaacttcatgtccactcccggtctcagtgctggggttttgtctgctttgcatctgtgcggtcaatctctgtgtgttcatatatctgtgcatcagccctgttctgtctggaagactctgtcttccctagagtcataatgacctctggctcttacattctctctgcctcctcttctgtataggtccttgagccttgaagtagacgggttggataaagacttccatttagggctagctgccccaggctctctcactgtgcaccataggacagcgcttcaatgggaaagcctaccctccttcgtggggcgctctaagaaggcaaatgctatgggcaaacacggaatataaccgtgtggaatgagaagtacaatgttgaagaaggtagtcacagtgctcctcacaggaaggtgatgggaacatgggacaggaggacctgagttcaggagaacaggagggagaagccatggagtgcctccagccaatttctgactcccagaatgggcctcatgactcccagtttgtgccatagcccacactagcctgtgggccccatggaggaaggggttctctgctctcgaggagtatttacaggagtttaaaacagatcttacagaatgaaatgccacctgtgaggccagacagtgatgcattcttagtggggcctcaagaactgacttcctttcttttccttcgaatctccatctccttcagtaatcatggctgaactccagccaggtgcttgcccaaaccctggggagggtggagcaggcatgagcacaatgcagtctgccctgaatgggaggctagctggaacgtcctatgaactgggcaggtagagcattacagttgagaacacatgtccttcctgctctctgggccccaacttactcttcacaaccctatttaaatatctgttcctctatagaaacttccccaaatctccctgtgtagattgacctctgttggatagagggacagatgggtagatggaaggatggctggaagaacaaatgagatagatgggttaaataaatggatgagttggtcagtgggatgatggatggatggtggatggatgggtagatggatgtcgaatggatggatggatggatggatcaatggatggatgatagatgagtggatggatggatggatagatggatggatagatggatgataggtgggtgagaagatggcaggtgataggaagctatgaataaaaagttggcaccagaactatctatccatttgatatttgttgagtgccaggcactggggaccagctgggttttatgtcatctttcatgaaacactgcagcctggtttcagtcaaggtgagggcaagaatgtgaaagccagacttgaactagtgagacagaggaaacctattctctgaaaacacaggtgcaagaaagtttgcctggctgggaaggattgggagctgggccctccgaggggtccagtgtgagaaagatagctctgagctgagtgaagctgtggctagctgcaggtaccacacagacttcaggtcaaaggggcagaagacagaagattctgggcgagctggaagggacacattccttgagcctgcacccacacaagctcttgcttaacccaggcagtatttcgagctgtccttagtcatctttcttgctgtgcgcaaagatcctgagccactgtaggctctgaaagtgactcatgtctatgatgaggcctggcacctggaggccctgtagtccttcccttgctttgttgctttgtcacaccacgtggcttttacaaaccagacaacagtatggcattctggtcttcagatatgacagaaatgaaccttcataaattccctgagatgatgggtttagatgcaaacatttcctagccattggagcacagagatcacactgaaagattgcatgttttatatccagcagtcatttctgaatatgtgtgtgtgtgtgtgtgtgtgtgtgtgtgtgtgtgtgttgctggggactaaatccagggccttcacacttgctgggaagtgctctgtcactgagctacatttttctggaaactttattttgagacaggatctcactaagctcccaagttggctttgaactcacactgtagcccagaaaggccttgaacacacaatcctcctgctcctacatctcaagtggctaagattgcaggcctgggcccccagtttgtttggtttctgattatgaagattgctgggttttatgtctgtccacaggaaaggaaattgaggctcagagaagttaagtaactcctctgactccggttggtcacgctcaatctccgtgccccacacgtgagttctcgatcacctttctgacccagacccaccctccacaactaccatcgcattctctacatttttttaaaccttattttatttagtgtacacacacacacacacacacgatgcacagaagacagctttcaggagtccattcacaccttctgccgtgggtgccaggtactacactcaggctatcaggttagtgtaccagttgccttgctcactgagccatctcaccaggcccctctcctttcttacggatttcagtgtcaggcgtctactacatgcccagtcgtgtgtgaactgtggaccctgtgaggggtcccatgagtatgtaggaatggtcacttaaatgagatatattgacatacgtgtcaacctgtaggtgtgacagtatgatcaacatgttaatattatatcaacaggtacctataatatgacccttatcatttaaaattttattcaagttgggcatggtaatacatgcctatcatcctccaaaaatgaggtccagaggatcaaaagttttaggtcatgatctattacataatttgtttaaagccagcctgggttgcatgagaccctgattgaaacctactcccacaaagagataagattttatgatgtctatgttatatgttgatatcttatatatcattgtatacaatcaacagtatatgtgtatgtgtatatatatatatatatatatatatatatatgaatatatatggatcaatgaaatatatgttatataaaatatcagtatacatacatacatatgtatgtgtatatacatacacatatgtgtgtgtatatatatacatatatatacatataaatatgtatgtgtatatatatatatgaaattaagtttctttgtatatatgcatgagagttcagaagaggttttgtaccccctggagctagagttatatagtgttgtgagccattcagtgtaggtgctaggaatcgaacatggatccctcttaaccactgagccatctctccagtccccatgaaattatattgaaatactgcttaataggaacaaagcaggatccgatcagagcttgaagacattcatcataccactgtcctgtagcagatcacaggctcattggcctctcagggtccctttgagcagcagctttttagccatgggccaaatggtgtgaacacccttgctctcccatggctaatgtcccagtggctggcagacaccctgtgggcctggagcctacagggagaaaaagtatgcatggattcaaaggaactttatgaatattacaggcccagccagcattatgaccccacccaacctggcaggctgacctagcccggggaggggcccagcggtaagcaaagggtgacaagcctttcagaagccatatttgcatataggcctttggagggacatggttgcaatgctgtggctgacgtggggatgagagtgaggtgctgactgcctgtggaggtctgtaatgtccccttcccaagttaaaaacaggttcgcttagggagaagtctgtgggtgatgtgttgacagatggcatgcacgggtatctggattctatgttgcaggatgtccaaggacccgacttgaagggacttggggctgctactcctggagagggggattgaggacctacccttgtaatcttcaaatgtcccaggaataaaccattgctttttttctccctagggtccccgtcagggatctaagaaggaaggatggaaggagagaaggctcaattttatttcaggccttttctagggcctttgagcccttgttagacaaatggtagtagaacaggaaacccaagctccccacaaggaccacagctggccttgccccagacctgccaatccccaaagccacactggctgcttccctccccttccaagctgtgtgtgacagaagggatgtagtgagctcactgtcaccttatccctagtgactggaagcaacccagagtgaccaggtgaaaggggatggttacgttggtgattaaagcatctgcctcgggctaccactgtagccttgacattcccgaggacccctttcccagctacccatgttgccccgtgcctgccaacacccaacagcatgccttctgctctctccccaggtgtcgtgcgccaagtgcggcccatcgtgggcccgttttacgctgtcctgaagctggagatgaactacgtgttgggaggcgtagtttcccaccggaacgtcgtcaatgtacacatcttcgtctccgagtactggttctgagggccggttgtggctcagccaggagtgtacgcccctacgcccttgctgccagtgacagccaggtgcctgtctctacccctcgggcctcccttgatgtttcatattggtttgtatggccacgtgcattaggctgagccgcatcacttaagtccagctggtgtactgtggcgtttaaacatggctcagctgggtggttgaatccttgcttttttttttaaatgcaaaggccaaatcggaattttgttccctttctctacctgtgagctaggcattgctaaggaccaattgaaggagttttcaaagcagcactccacccaaaagccgaggtagttctcactgagtctgcatgaggattggcattttggtacttttttttttttttttttaaccaacggggctctttgtgtttcaagttgatggctgctgtagagtggcacataaataaatgtacaataaattctccccagaagca

SEQ ID NO: 146 - DNA, 2713 bp, Mus musculus
cctcctccgggcgggataattgaacgcggcgcgcaggagcctcgcgttggctgcccaggcctggctcgagcgtgtagccgctgcccgccgtgcctttgtccgccgccggagcccgccagccccatggagcgccccgtgccgtcgcgcctcgtcccgctgccgctgctgctgctcagcagcctctcgctgctggcagcccgagcgaatgcagacatctccatggaggcttgctgcacggatggaaatcagatggctaaccagcacagggactgctcgctgccgtacacctcagaatccaaggagtgcaggatggtccaggagcaatgttgtcacaaccaactggaagagctgcactgtgccacgggcatcaacctggccagcgagccagaaggctgcgcctcgctccacagctacaacagtagccttgagaccatcttcataaagaggtgctgccactgttgcatgctgggaaaggcatccctggcccgagaccagacctgtgaacccattgtcatgataagctaccagtgtgggctggtgttccgtgcctgctgtgtgaaggcccgggagaattcagactttgtccaaggcaacggtgcagaccttcaggacccagctaagattcctgacgaggaggaccaagaagacccgtacctgaatgaccgctgtcgaggtggcgggccctgtaagcagcagtgccgtgacactggggacgaggtgatctgctcttgctttgtgggctaccagctgcagtcggatggtgtctcctgcgaagatatcaatgaatgcatcacaggcagccataactgccggctgggagaatcctgcatcaatacagtgggctctttccgctgccagcgggacagcagctgtgggactggctatgagctcacagaggataataactgcaaagatattgacgaatgtgagactggtattcataactgcccccccgattttatctgtcagaatactctgggatccttccgttgcagaccgaagctgcagtgcaagagcggcttcatacaggatgctctaggcaactgcattgatatcaatgagtgtttaagtatcagtgctccatgccctgtggggcagacatgcatcaatacagagggctcctacacatgccagaagaatgtgcccaactgtggccgtggttatcatctcaatgaagaggggacccgctgtgttgatgtggatgagtgctccccaccagcggagccctgtgggaagggacaccactgcctgaactcccccggcagcttccgctgcgagtgcaaggctggcttctattttgatggcatcagcaggacctgcgtggatatcaacgagtgccagcgctatcccgggcgcctgtgtggccacaagtgtgagaacacgccaggctccttccactgcagctgctccgccggcttccggctgtctgtggacggccggtcttgtgaagatgtgaacgagtgtctcaacagcccttgcagccaggagtgtgctaatgtctatggctcctaccagtgctattgccgacgaggttaccagctcagtgacgtggatggggtcacctgcgaagatattgatgagtgtgccctgcccactggaggtcacatctgctcctaccgctgcatcaacatccccggaagcttccagtgcagctgcccctcatctggctacaggctagctcccaatggccgcaactgccaagacattgatgagtgtgtgaccggcatccataactgttccatcaatgagacttgcttcaacatccagggcagcttccgctgtctgtcctttgaatgccccgagaactatcgccgctccgcagacaccttccgccaagagaaaacagacaccgtccgctgcatcaagtcttgccgtcccaacgatgaggcctgcgtgcgggaccctgtacataccgtctcccacaccgtcatctcgctgcccacctttcgagagttcacccgtcctgaggagatcatctttctgagggctgtcacaccgctgtaccccgccaaccaggccgacatcatcttcgacatcacagaagggaaccttcgagactcctttgatatcatcaagcgctatgaggacggcatgactgtgggtgtcgtgcgccaagtgcggcccatcgtgggcccgttttacgctgtcctgaagctggagatgaactacgtgttgggaggcgtagtttcccaccggaacgtcgtcaatgtacacatcttcgtctccgagtactggttctgagggccggttgtggctcagccaggagtgtacgcccctacgcccttgctgccagtgacagccaggtgcctgtctctacccctcgggcctcccttgatgtttcatattggtttgtatggccacgtgcattaggctgagccgcatcacttaagtccagctggtgtactgtggcgtttaaacatggctcagctgggtggttgaatccttgcttttttttttaaatgcaaaggccaaatcggaattttgttccctttctctacctgtgagctaggcattgctaaggaccaattgaaggagttttcaaagcagcactccacccaaaagccgaggtagttctcactgagtctgcatgaggattggcattttggtacttttttttttttttttttaaccaacggggctctttgtgtttcaagttgatggctgctgtagagtggcacataaataaatgtacaataaattctccccagaagca

SEQ ID NO: 147 - protein, 703 aa, Mus musculus
MERPVPSRLVPLPLLLLSSLSLLAARANADISMEACCTDGNQMANQHRDCSLPYTSESKECRMVQEQCCHNQLEELHCATGINLASEPEGCASLHSYNSSLETIFIKRCCHCCMLGKASLARDQTCEPIVMISYQCGLVFRACCVKARENSDFVQGNGADLQDPAKIPDEEDQEDPYLNDRCRGGGPCKQQCRDTGDEVICSCFVGYQLQSDGVSCEDINECITGSHNCRLGESCINTVGSFRCQRDSSCGTGYELTEDNNCKDIDECETGIHNCPPDFICQNTLGSFRCRPKLQCKSGFIQDALGNCIDINECLSISAPCPVGQTCINTEGSYTCQKNVPNCGRGYHLNEEGTRCVDVDECSPPAEPCGKGHHCLNSPGSFRCECKAGFYFDGISRTCVDINECQRYPGRLCGHKCENTPGSFHCSCSAGFRLSVDGRSCEDVNECLNSPCSQECANVYGSYQCYCRRGYQLSDVDGVTCEDIDECALPTGGHICSYRCINIPGSFQCSCPSSGYRLAPNGRNCQDIDECVTGIHNCSINETCFNIQGSFRCLSFECPENYRRSADTFRQEKTDTVRCIKSCRPNDEACVRDPVHTVSHTVISLPTFREFWEEIIFLRAVTPLYPANQADIIFDITEGNLRDSFDIIKRYEDGMTVGVVRQVRPIVGPFYAVLKLEMNYVLGGVVSHRNVVNVHIFVSEYWF

SEQ ID NO: 148 - DNA, 99918 bp, Homo sapiens
  misc_feature (1)...(99918): n = A,T,C or G
cagcgttggctgccgaggctcggccggagcgtggagcccgcgccgctgccccaggaccgcgcccgcgcctttgtccgccgccgcccaccgcccgtcgcccgccgcccatggagcgcgccgcgccgtcgcgccgggtcccgcttccgctgctgctgctcggcggccttgcgctgctggcggccggaggtaggggcgtcccgggtccgccgcccagcttagggtcccgaccccctcggcctcgcgctccctgcgagtttcggaaccacggggactcggagtccgtgcgttgccctgcgcggcgcccccggactgtcagcgccgaggcctcggcgacgcccccctcccccacggccagctccggtcctcatctcctccccggcctggggacttgtttcaaaaccggattcccccacccctcaaacacaccgtcctaccccagtcctagcaaatccagccggctccgggggccgcatcccgggccctgggggttcaggggcgctagctgggctgggggacgctggctgggggttaccgagcccagggcgccttgcacttgacgctggaagcgccctcggctatctttcctcaccgcttcccgcctccacccccaggtaggagctgttgtacccagcttgcggatgtgaaacttgagcctggagggtgggaagcagtcttttccccaggagacactagcggtcctgggataggggctggagaggaagaaatgagaaagccagggagcagcctggaggtttttggggcgtagctgggaggatggaggggatgcggacctggccacctcctccctgcctccctcccgggacagagggcccaaggcagtggttctgccgggctcggtgctcagcggggactggggactggtcacttccaccaatggcaagggggatggagttttccaagagcagatctgatcgatggcccagaccttaggccccaactctgggactgacagctccgggacagtgcccacccagcccgcgcttttctcccctctaaccctcaaggcctggtccctggggggactgccacgaggtcctctgatcagagcagctgctgggcggcagagctatgacctgtgacctctctgctgacccgtggcttctcagagccactagccaggcccggcactcctggcgtctttgtttctccagtggcccaggtccaggggagtgccctagaccaccctcagaatccgagtcttaatccctggtttagttgagttccttttaacctctggtgaccgcctttgttagtcaaaaggtcgcttgtcccaactaatgctcactgggggattccaggaagggggctgaagggggctggagggggaggggaggctgggagctgagctctacagagctttcttgactggctggctgcagcagagccctgtggagctctgattgttcaggcggtgctgggcacggcctgggcacctcgtggggttggagatggtgtggggaggcgcagagctcagtgttggcaccaggagccttcgcagcccctgggggctccctggaggctctttagaagagatggagcttgatgtaaggggagcgcgggaagagggcattccagcaagcagcaggccgggtggctgccagctggagggaaaaccccgaggggccctgggtgatgggtgggtgggacatccgagactcctgttagaaaaggaaggagcctcagaggccccgattgtgtcgatgaggaagctgagggcctgagagaaggcgtggtaaaactctccctggccccggagtctctgcgttccctctcactgttcttttctgtctgcggtttgcgaacaatttctccctatgtgtgtgtgactgaatgaacaccccaggacttgcgggcccagtgtggctcactgctgagccacagagaagtttgtaattggaagggtttaaaaaagcctcctaattgcacacttcgataaaagcagctggatgtcctgtgggccttttgtttcttttggggagaagtctctttgagtttcaacaggtttaatttggtacagtttgggaaggggcttttgaagactgcctggcccctatctgcagctgtgaggcccccgaagccctgtatgtaaggccacaagtggcaccgcccctgctctcagagagctgtggggccgcagatggtgagcctgttagctgatctgcagaaactcctttggcgacggccgcttaaatggagaagggcgctgatctttcttgccaaacggccgagaggagccgcctgtctgtcctgtgtctgtccgtcccgttgggctttactgagagctgggtgggagggagtggagaggaggaggtgttaggaaaagacgattgtgttttctccaaggctttcttggcctctggctgcagccgggcagcgtttccgactgattaaaagaaagttgggagggagaacaaaggccagggaggacttggcttgaaaacgtgtggtctgtgccgccactcctggaagtttcccagtcaggaggtgggggccagggcactgaatgcatgaagatgagactctgtgccatgggggtcagggctggggcctctcctgcagcacccacagctctggctcacgccccgctcctggccctgctgagtgccccccaactcagggctgcatttgccacccctgttaggtgtgtagggcaggagtaggggcacgcggctgactcatcttcaggtcctggagggctccacgggccttgtgagactagaaatcagtttgcatcagaaaaagccatgagatggtttggtggttttctcatttataaaatgaagggaacaaaaacctacttaggttgtcttgaggattaagagagagaacataggatagtgtctaccatggcagctatattattattattattattttattttatttttgagacggagtttcgctcttgtcgcccaggctggagtgcaatggcatgatctcgactcactgcaacctccgcctcccgagttgaagcgattctcctgcttcagcctccccagcagctgggattgcaggcgcccatcacgcccagctaatttttgtacttttagtagagatggggtttcaccatcttggccaggctagtctcgaactcctgacctcaggtgatccacctacctcggcctcccaaagtgctggaattacaggtgtgagccaccgtgccggctggcagccctgttattaatgttagctattattcctgttgtccccttctctaggaagtgttggcaccaggagccttcgcagcccttgggggctccctggcggctccttggaggagatgaggcttgatgtgaggggagcgcgggaagagcgcaattctgccaataccccagaattgttttccccaagatgcctctgcacattctactactactgaatttcccagccaggcgctgagcagaaggccccatggggctataggactggtagtcgtcagtgccaaacccgtgtcaggaaaggtggtgttcttagccattcagtcattcattcactaagggacagctcagtgccagacactgctctataacttgtggatgtggcaggaaaggagagagacccagtttttccccctcatgcaactaggagatccagaaaaatgaactgagccctactggcagagtcagggaagacttcccggaggaagcggcatgcaaactgggaacctaaggaggaaaaggcagtggctaagtctgtgggtagggctgggaggatgggggaaagggtgttcctggcaggggaaatggcagggccaaatacctggaaggaagagaaaacacgagacttccagggaaaccccctccttctacccacttccagttccttccagttccaccccctcctcaccactgggggagactgtgctgtctagagacttctccagcagcttccctgacctggtgagactttaagcccgggctctgagcactgggcacctggtcagggccgccttccaggtgaagtttattagaacagttctaagagggcatgtagttattttgccagcatattttatacaacaagattttccttttgcagaatagcaaatcataacaatttgatgaatgaatcctttcgtaggccccatatggttccagtttccttgtgatgatctcacatgtggccctataagtaaacagggtgggaggggggaaccactgtgtcaacttccctgggataggagaccccctcaggctggaggggagctcaggactggctaagtcatctgccacaagtcacccagcgaggagcggggctggggctgggcctagagctgggctgggccccacctcctttaaccccacagtggtcctaactagaggctggggtgggagggagcgaggcaccagtcgccatagcttcctacaggttatttgcgggttactacactgtgcggagccaacatgagaagggggttaggaagctgtgtgttggtcccaattctgaaagtgtctggagagatcttgatgacacccacaaactctctgcctctgtttccttcactataagatgtgagtgtcctctgggtaattattataggtgaaatgctttacatttagtaaccaatgtcgtcatctcagcagccctacgaaataggtgatccagtgttgttttgaacctatttttattttttattattatttttgagacggggtctcactctgccggccaggctggagggcagtagtgtgatctcggctcactgtaacctccacctcctgtattcaaaccattctcctgcctcagtctcctgagtagctgcgactacaggcatgcgccaccacacctggctaatttttgtatttttagtagagatgtagtttcaccatgttggccagactggtcttgaactcctgacctcaagtgatccacctgtctcggcctcccaaagtgttgggattacaggcgtgagccactgcgcctggccctgtttttcattttggatcctgttacccactggagtgaaaaggtcctgtgagttttgctacctaggtatgaagcccggcttcttgttttggcctagaactcctctatggacctgcacagtgccatttctgagagtcactgatgcgtgtgataggttgaggatggaaatccaacacctgtgcacccagcatggtctccccacagcacggggactcgagcaccttcctgccccacccctgccccagttcacctgtgttacctagctataccctcaccctagccctgcaaaggaggtgctgtcattgtccccctcatcaatgaggggacatggaggcccagagagtccaggtagcaagactgtgggtgcatagctgctaagtgacagcagcaggacttgagcttgggcagcttggccctgacgtcatacccctcaccagcacactggacagcctcgcgtatctttttttttgagacggagtcttgcactgtctggggtgtgatcttggctcactgcaacctctgcctcccaggttcaagcaatcctcctgcctcagcctcccaagtagctgggattacaggtgcccgccaccacgcctggctaattttttgtattcttagtagagacggggtttcactatgttggccagagtggtctctaactcctgacctcgtgatctgctcaccttggcctcccaaagtgctggaattacaggcgtgagccaccgcgcccagccagcctcacgcacctttagaagacttgaatctttaagtctagttcagggggggatgcctgtttcctttggagtgtgatggtggggtgtgtatgagctttacagtcagagctggatctgaagcctgcctctgcagaggctgcatggcctcgggcaacttggtgattctctctttgcccccactttatagaatacctaggatcatgtgagatcatttgtgcgttcattcattcacggacatttattgaatgactgcttagggcaggcatgggggcaggaggcagaatgagacagtgtctggctcagactcatggcactaagtacagagttaattatttgtgctaagtgctgggaagctcagagtacaaagagaccatgcaagaaagaaaacatatttgtcccatgtgcatgcgtgtatatgtgcatatgtgtgtgcattggcggtagttagggaggacttcctggaggaagggacctttgagctggtgtggcatgaacaagctggcctgaggagagcaagcgtcctgggaccctccagcctttgaagctccaggttccaaatgccaggtgcagaggatgcatgacaggtggccagaggggtgagaggaacaccaggggagatgcgtcctggaagcccaggaggcccttggagcagggtgggatgttgcagaaggatgaggatgcccctctgtgcactgggctgatgtaggaagttgctgccggggccagagctgcctggagggaactgtggggagaatgcttctcgccttcccagagaggtaccttctgctccttctctcttgctgcctcctcccggctggttcaccatccaagacccctgtcatctccatgacagatgctgggaacaggctcagcagtggacacagtcaggtcttgtgttggggatggggccaggagccctaagagcaggctccagttcgccctgcttcctcctgcagaggccaggtggtcttgaagaggggacacgagtctgtcctcatcctggaactgtaagggatgcagggacataggccaatctggctggacccctggtggcttcccagacaacatagtaaaactccgtctctactaaaaatacaaaaaattagccaggcgtggtggtgggcgcctgtaatcccagctactcaggaggggcagggtgcaggtgggggttgggtggagtcgcccagtcctgtttggttggaactttccatcagggtctctgtggttgacatcttgttgcatttcaggcttttcggttccttggttctggacaccacggaggccactccaactctttgctgtagctttagacaatgctgtggggcaggtggggtgggggcatgatccttttgtgtggtgagtccgggaggcacacaggatgaagcctcaagctcccattcacttttaaaaactcctgacgccctcagctgcctctgagtttttgagcttgagcagaggaaatcaaggaaattgaggctggcttctgatcacatgcctttacttcatccccagctattcacggagctttgccaacttaaaatatcctcatttgcccgatgaggatattaaaataaaaaacagacacccattcaaccaccatctcatatcgtcaccacttcacagaggtaggggacattttaatgccccggattttggaaggacgcggtctcacaataaaagacagtattgtagatggaatcgggccggctttgtagaggtccctggatcctgctttgctttcaccctattttgttgcaacccagtggaaattttgccagagcaatgcccttacacagggtgggattggggaagcctgctcttaactgcaggccaaatcctccattcagtttataaatgaaaaaactgaggcccggacttgctccgggtgggaaaactctcaaccatgagatcagaagcagactccaggcctcccggttcccagcccccagtctcccctctgtgacagtctgcttgctcagcaacctgggaattaagatcctcgtggctcacaggctgctggggatgggatcaggcattgcccaaagcttctgcgatgtttacagctagcaggctgacattctggaagcttccacccaaggagtggtacagaatctctctgagcatctgtagtcttagaaagagcacgtggccatatccttcctgggtgtccagggcatggtccccgcaggccatgtgacctgtgtttctctgcatgccttggaacatggggcatgccgctgatctacaccataatctttatggaggtttaactcacctggaaaaaatttagttttagcagctgtcccaggcaacaaacggtatctgaggcctgtgaactgagccagctccatccatctgcaccagttactccggcaggcatgtgtctctcctgaagagaggtggtggatgtggtggcgtgttggccatcgggcaccgtgtcagcctggaggagtgtgtggttcctttgaaaaagaatgttctcccaatcctggtgtgataacttttccttttgtttaattttgaagcttctgttttttcctgtggtcagtgtgctaatgtaagcacttttcctggattatctcatcaatcttcccccattttttttttttttgagacagagtttcgctcttgttgcccaggctagagtgcaatggcatgatctcagctcactgcaacctctgcctcctgggttcaagtgattctcctgcctcagcctcccgagtagctgggattacaggcatacgtcaccatgcctggttaattttgtatttttagtagagacgggctttctccatgttggtcaggctggtctcaaactcccaacctcaggtgatccacctgcctcggcctctcaaagtgctgggattacaggcatgagccaccatgcctggctttttttttttttttagacagtctcactctgtcacccaggatggagtacagtggcacgatcttggctcactgcaacctctgcctcccgggttcaagtgattctctcacctcagcctcctgagtagctgggatttcaggtgcccgccaccatgcccagctaatttttgtatttttagtggagactgggttttaccatgttggccaggctggtctcgaactcctggactgaagtgatgtctgcccacttcagcctcccaaagtgctgagattacacccatgagccactgctcccggcctcttcccccatttttacagatgaaggaagtgagcctccttgagtcttagtaagggagggagctggattcaaggctgagcagttttaacccgcagcgttgccttccctgggaacattcgagttgaaggttaacgagattttgcaagagtttgctcttggtttatatctaatattatgctttggatctaactcacatggtcagatgcaggggtcagattgagactggttgattgaaactcctccgaaacaacaggaaatgatctgggagagaagattccaggtcccctgaggccctgcttctctcttgatcccccacagcccagtgtcgagttaccagcgagtgcctgttctgcttgggtgggtgtccagtgtgggactggtcagaggtaatttttggatctcagagctgctcacagctgttggcggtctgggatggaagaagcaggcgtggcttcggttggcccacattatcctcctgactcacagtgttccagggctgctcagctgccctagggtttgtgtacaaatggccttgatttgacacccttctgaaggtggggggcctgactgatcaggcagttggttggatgctgttgacccccgcagaactcttggtacctatgaggcgtggagttggcgtgggggatctgttagccccagtcccctttttgcccccaccccagcctggccgagagtcctgggcaggcactgagaaggcaacacatggggtaggacttgatgagcaggtggataggacagtgaggtgggaggtgcctctgtgggcctcagatggtccccagcctgtgtgatggggcagcgaagctcaggacacctggtgtttggatatccacaggtgaccggatccccaggcaaatgagcagctggaagtccctgcagggatgcgggaggcacagccagggtggggctggaccccaggcccttccccactcccatcgccccaccctcacaggacacacgggggagctgtgatcctcagggtgttcttttgtttttagtttttttgttttgagacagggtctccccctgtcccccaggctggagtgtagtggtgcagtcgtggcccactgcaagcttgaactcctgggctcaagcgatcctcccacctctgccttccaaagtgctaggatcataggcttgagccaccatgcctggcctttttgttgttgttgttcttttgttgttgttaagtcatctttattttggttgcaaagttgcaatctattttttactgaacattttaagtctcatttgaagtttcatagcttgccgtgtaaaccattgcatacactgtcaaactgctgtacagaacattctgaaatacaatctactaaattaattcgcttgacactgttcagattactgcatgaaaacaacattgattgaagaaggcaagtaagtcaacgggcaaagcatcgattgctttcctactgtaggatgttataagatgaccaacaaacactaaattattttgcttaaaagatgtactttttattgtggtaaaatacgcatcacatgggatttgccattttaaccatttcctttttttttttttttgagatgtagtctcactctgtcacccaggctggaatgcagtggcataatccctgctcactacaacctttacctcccaggttctagtgattctcctgcctctcagcctcctgagtagctgggattgcaagctcaccccaccaaacccggctaattgtagctgggattacaggcgtgagccactgcgcccggcccattttaaccatttctaagtgtatggtccaatggtattaaatacagtcacattattgtacaatcatcaccacctccatctccagaacttttcatattcccaaactgttaaatactaactccccgtcctctcccccgaagcctgtggcacccacccatccttttccttcctgtctctgacaaattccctacaaatttaactcctctagggacctcataggtactcttatcctgggtcaccatacgtgccttactggcctttcttttcataaccagagtaaagcttgtttattttattttgagacggagtcttgctctgtcgcccaggctggagtgcagtggcgtgatcttggctcactgcaacctctgcctcccaggttcaagcgattcttctgcctcagcctcctgagtagctgggattacaggcatgcaccacacgcctggctaatttttgtatttttagtagagacggggtttcaccatgttggtcaggctggtctcgaactcctgacctcatgatccgcccacctcgacctgctgggattacaggcgtgagccaccgtacctggccaagcttgtttatttaaaaggggacagagacaactttttttcgtttctaatcggaatgtgtcttggaaaggatatgtctgaggggtgggagtggagttggttttgtgcttcagggaacctgttcctgccctgtcccaaggtaagcttgtaaagaggtcggtgcccttgttttggaacccaagttaatgacacaccttttcttgtgtgggctacacacatctttaacctgctgcagatagtacttttgttggcatctggagccatgatgccaggcccctcttctccctgaagctcagttttcctctaatgggtgggaggtaaccagtgctgagtccactaggaagatcgaggcacatctccaaggctaagaaaccggcagttctgtagcctcagccactcccccacccctagctcatccctggcttttgccgaaattctaaccagccccgtattttgtgtgggtgggctccagcccctcgggattttcctgggggtcactgcctccaccccctgggacgatggaggaggaggaggcttgtttgtgggggcagaggatcttgccccagcagcctttgcatgtcaagagtggtcttgcagatcgggccccttgccctggctctgtttaactggtgcttactgagccgtgacgtttgtgctgggcatgggcaggtgcgacatggacagtgagaggaggaagacaccatccctggccccgaaggaggttttaattcaggaggagcaagaaagaacagtgttggaggctgccaggactgagcctgatgccagaactcagggcccaggagccgtgggtgagagcagtgggcaggagggcgtgggggcctccagtgtccactgagccctgtgaggagctggtcacacactggtttgctgtgggagcagggacaccttaacatgtatgttcatgtcactggtgacttgacgcttttcagcttcctctgttcttaattccatttggagcccaggcaggatgatagcagaatgaatggaaggggttgaggagtgagagccggtgaatgagaggggccttgtctgtaggcctttgtgggtcagggcccggcaattgattggtgagtgttacagtgaggatgatcgtccacctcttgggtcccctccccatgcctctgcctcgtcgccatccagcctggccatggtccctgcttggctctttgtggactccctgatggggctgtgcaggagctctcccttggctaatgacggggtgagctcagctcccctcgggcacagcccccagacagccctgctttgcagagttcagctctggggctgctcagaacatgggagctaccttctgagtttccggaagaccaaaggacttcacatttgattgtcctgctgagagtgaggttcacagtacccagactccccagcaggaagcatttccaaaccgtttctgcagctctgggtgcaaaattcccagggctacgggagcctgcccttccctgtgttttcctttctcagagtccgaaggaggctctggggccacagctcacctgcgggggattccgcacaccagcacccggctgtgtctcccccatttcttatgagcagcgataagtcaatccccttcgacggtttaatcctccagccactgtttacagaaaactttctgtgtgcttggaactttataaagtgcatccctcttctcagcaaccctgggaagacagtgcaagccccgttttcccactggggaagctgtgattcagagaggcggcgctgcctgcccagggttagagagcaagaaagtgctggagctgggattggaaccaaaggctgtttggctccaaagcttacactgtttctactcaactctgtagctgccacatgctggcatggatgtcgggggtatacaaggacaggagacagagcctgccctcaagacatttgtggctatgagggtaaggcaggcaggcagggctctggaggatggagagacatgcgccaggcacggggtgatatgggagcagaggggcacccgagctatgcagggtgggcaggcaggcggccaggagagggtgacagggcatgggaggtgggctaggataggagacgggctgtggaagacacgagggtgaaactgcaggtgggggctgagtgggcctggccagagaaggggtgaagggagtgtggggacagacatgggaaccggggttggctgcagaaagggtgaagggggtagggggacagatgggaactgggcttggctgcacaggggagagcagcctcgctgtcaggccacatggctggatcacatcctgttcatccaggagtgcaccacggcctgtctcgtctgtaacagataaggtccttggcttagtgagtacttttgcttttcttaatgaattagagcaagaatgaatgaatgagtgaatggggacattcaaggttatccccatgataacacggttgtcactcctgatgacttttcctctggtgctgggaggcaactccagacaacttgacattagctctgcctcctggtgaatctcacgttcaccgaagagcatcgctggagaggggacacctgaggtgggaggggggctgagtggtcaggctgctggaaactgttgggctttgctgtggcacgaaacttcacccttacccacgccactgcaggactcctcctgccagcctcggggagccgggtgagagtcagaagggtgggtctaccttgcactgcagaaagcagctctgagtttcctggaagccctggggaaaagggaaagcccagaagttgtcactgggggacatggttctaggtgagacccccctcctcctggccttgtggaatggcctggctgagccctagctcattcgtgcactgaccttatccattctggaatgtttctgcaagtttcccctcctcccctgctgagaacgggatggagcatctgaaggacgcatagtctagaagtgcttacagtggctgatgactgatagggtggtttagcaaggtgctgcctcacccagcagacagcagccgccctctgggccaccccgagggcccagcctggaagaagaatgtattcaggcagggcacccacagttgtgtgtgcggaaacgctgccaagcccagtgggatttaccctctaggggctggaaagccattaggaaggaaaagtggtgcttcttaaagcccagttttgtaacatcctgccgagaggtgaccttctgcccagcagctggggctgtcgtgctaatgctttctggcatttgagtcctttagaatgaggtccaagtatgtgggcacctggcacccggccgctcctcccttggggcacaatggggtcttctcccttccgtgagctgaggggctgggagggtgcccactggggctgtagcctgggctggggcatggggcacaagggcctgtgtgcccagctcatttgggccgtggcctggctctgagggtgtgggccggctgcttggagcgtgatcctttcatctgccctttttgcgagtgggagataagatggccaggctgcggttactcctgaacctgtgctctctgctttgccagtcctgtcctcaccagacttctcacaggtccccgtttctgtggaagaggggatcttgtggtaagtcaagggcagaaaccatcaccagcctcggtttcctcaatctgtagcttgaggcttatgtcccccctcctgcccctttgctcccaagattaaaggagaaaacacggatgtgggtcacagaagctggtctagaaatggtggtttttaggctgggtgcggtggcttatgcctgtaatcccagcactttgggaggccatggctggccaatcacgcaagttcaggagttccagaccagcctagccaacatggtgaaaccccatctctactaaaaatacaaaaaagtagccgggcgtagtggtgggcacctgtaatcccagctactcaggaggctgaggcaggagaatcactcgaacctgggaggtggaggttgcagtgagctcagatcgcgccattgcactccagcctgggcgacagagactctgtctcaaaaaaaaaaaaaaaagaaaaaaaaagaaaatttttttttccttcttacttgactcagctcgttgcattttgaaccccctccctgtttgcagtctctcctctggaaagagtcatgtcggctgttccctgacctgctgggctgggctggccggcagcatggccgtgcctctgtcatcaggggctgtctttcttgcctactggactgtgaaggcagggaccctgtctggacagggaccgcatcagcatctccagcatgtggctggagcagggatccatgtgtgcttggatctcaggggctgagccgcagccctgtccaagctggattcagatgggggaggattcaggtctttcttctaggaaggagtggggtgtggactcgcagctggggtctggtggggttttcagtactggtttgcagagtgactaagggatgtgcccccagcctgatgctgtcgtcaagacagaaggacgtgcgtgtcctggtggtgcatctgggagggccctccacccgctgagtggtgagccacctctcagcttgttctcttccctgcacagtggacgcggatgtcctcctggaggcctgctgtgcggacggacaccggatggccactcatcagaaggactgctcgctgccatatgctacggaatccaaagaatgcaggtacgtttgccagtggccactgtttcactggaacaatgttcctttagagaaaagtgggggaggaagggacagtgtgtgccagacctctcgggagaggctggacacccaggcccggatccatccaggctgcgggtgctgcagtgggtgactcctgcctccctcctggcaccggcctggcaccgggccttggctcacccttcctgtgccactctgtgattgtcggggtatgtgtctctttcactgggctgggagcaagaagatctgggcttgcagctgtgggcaagtcagttttctcttttaaaaaaggggggacagttgtgggggagcaaaggagatgatgtgactaaagagctttgcgagtggaaacacggaccacctacagaccccaaaaatgccaatgagccggcgcagagtgaagcgttccaccagccggtttttcagcttctgcagcagccaacatctggatcgaccgtttttattcttctctccctacattgactccagctctctgaaaattctgagaccgtgtaagcttagaataaataatgagaagccgggcgcggtggctcacgcctgtaatcccagcactttgggaggccgaggtgggtggatcacctgagatcaggagttcgagaccagcctggccaacatggtgaaaccccgtctctactaaaaatacaaaaaaaattagctgggcgtggtggcatgcgcctgtaatcccagctacttgggaggctgaggccagagaatcgcttgaacctgggaggcggaggctgcagtgagctgagatcgcgccactgcatttcagtctgggcaacaacagcgaaactctaactcaaaaaaaaaaaaaaaaaaggaataaatgatgagattaggtcatgctgatcatcatcataaaaataatagtgaaaaccccagaatgcccgtgtggagcacctactttctgtgtaccgtctgcacggacagcagccagcctggccccgggaaggacaagggctggggaggtggaccaacctggttgggtttcaggctgggtgacctgagccagctcaaaggcaccatgatacctcctttctggggttgttataatgatcagagatcacccgggcgcggtggctcacccctgtaatcccagcactttgggagaccaaggcgggtggatcacctgatgtcaggagttccagaccagcctgaccaacgtggtgaaaccccgtctctactaaaaatataaaaattagctggctgtggtggcgggcgtctgtaatcccagctactcgggaggctgagacaagagaatcgcttgaacccgggaagcggaggttgcagtgagctgagaccgttcattgtactccagcctaggtgacagagtgagactccgtgcccccaccatcaaaagaaaaaaatcagagatcacctatgaaatcagcaccacaaagccagactgtggcaacgtattggttttctaggactgccagagcagagtataaggggcagggtggctcaaccaccggttcctcatagttccggaggccagaagtctgagaccgaggtgtcagcagggtgggctccttctgaggctcctctcctgggcctgtagatgccctcttctccctgtgtcctcacacggccctccctctgtatgtgtctgtgtcctgctcaccgcttcctcgaaggacaccagtcctttggattacagcctgccctaacaacctcatttaactatgtcacccatttaaagtcactgtctccaaatagagtcccattctgagatactgggggttaggacttcaccagatagattttgggaagacacaatttagcccataatagggagccactactattaatacttagtgaaataaaagaaagtgaggcatcagcccgtgtaacccctcaacgtgcaggcagaggaactgaggccgcagattcagcagcactctgggccttgcttgtgaatggggattttagtcactatcaaatgtattactgacttctactcactaatgtctttgataaattttggagttatcttttttctttattttttgaaactgagtcttgctctgttgcccaggctggggtgcagtatgttgatcttggctcactgcaacctccgcctcctagattcaggcgattctcctgcctcagcctctcgagtacctgagattacaggcacacactaccacaccaggctaatttttgtatttttagtagagacagagtttcaccgtgttggccaggctggtctcgaactcctgacctcaggtgatcctcctgccttggcctcctaaagtgctgggattatgggcatgagccactgcgcccggccaattttggggttatctttaatctccattgagtcccagaggacaaacacattgccttcttagaaatttcagacatacattagatttcctggaatgtaagaaataccatcagaatggctgagagggcattccttctctctttaagtgcgggtgcaagtccagactcctgggtatcgtgagtttccatatgacagtgtccctgaaacacgtggctcaatgcccaggacaccactccagggtcaccagatgcaagtgactggcccattgtgtcacttaggccccaggaggcccattgactcatcccagtggacacacaggccaggggccacatacctgtcctaggctgcctctcaagtgagctactgagctgcccagctctgcctgcgtcactgccctgtggccccaggtgctgtccgctgccctccagcccttcctgtgtgcttcccctttaccctgttctcactggggtccaaaccccacgcagcctgtgccaatcagaggccaagcctgggctccaggtcacagtgagacggagcccacataagggttcaggaggcagtcactgatgtggctgtgggggtcctcgggtgagcaggaccccgccccagcctccccaacctggggaggtcagagctcctgtctggttgaggcaagggctgtggatgcggggtgtggccagcagtgcagtgatgctaatgaagggattttctaatgagttttgtatagattttcatttttaatgaaggcagggaagggatagggcagatcagaaatcaaatcttatttacaagaatcctcttaatagtgatatttaaaagatgcaaaaaacagggatcactgaccacctggtttgtctgttgtgttagccagctctttttttttttctttttgagatggagtctggccctgtcgcccaggctggagtgcaatggcgcaatctcagcttgctgcaacctccgcttcctgggttcaagcgattctcctgcctcagcctcctgagtagctaggagtacaggtgcctgtcaccatgcgtggctaattttggtatttttagtagagacgggagtttcaccatgttggccaggctggtctcgaactcctggcttcaagtgattggacgcctcagcctcccaacatgctgagattacaggcatgagccactgcacccagccaaattctcttcttttgaagtggctttctgtgaggctcaccagctgaagtaaaatcagtttttgttcattcaacaaatctttattggttcttgatgctcaggaagaggcaggatgaaagccatgagcaggcaggcaagcccaggccagccctcctggcagcagtcgagggtgtgaggccctgagggtccatagggcccaaaggagggggtatcagctccctgagtgggtgagaggctcagagaggactgcagggagaggccgacctctccgcaaccatgggctgtagccaagcaggggttaagcagcctgcagcttcaacaaggacgtgtttggggtggtcagaagatggcagctttgatgttttcccatcatgaatcatcttgactctaggtctccaccaaggcccgacattccttgggatccagatctaaatccacctaaaactttggattagattaaacccacatgtccttcagcgtcttttggaggaatctggacacatccagtgaaacctaaagcaagtcccaagctgacattttccagcccagcatttctctaaccccttctttattttgcaaatctcactgagagcctgctaggtgccaggctccgttctggtgagtggggatcaatcggtgaacgaaatatgcaagtcccctggcctcgtggaggcggcattctataggggatgcagaatgcaaagaaagtaataagtccgtctgatggtttgtaggaaggcaggatgtgccgtgggggaaacagggaggcataggggcttctgctcatggtgggtttataattttagagccgtggggttggcctcactgtgccaggacctgaatggggcgtgggcagtatggaaagtgggaagagcatcccaggccgagggaacagccagcgcaagagcccagaggagagggtgtgtacagcaaggcggccagggtggctggagtggagccagcaacggccagtcccagggaggaagcaccagatacaagggtaaccaggtggctgagggggccatgagatagaggctggggtgttgggggtgagcctgaggcagctggacaccctgaggtgcctgggacacttgattgcttccaccttttggatgttgtaaataatattgctgtgaggccgggcgcagtggctcacgcctataatcccaccacttcgggaggctgaggcgggcagatcacttgaggtcaggcgtttgagaccatcctggccaacatggcaagatctcatctctactaaaaatataaaaaattagctgggcatggtggcaggtgcctgtaatcccagctgctggtgaggctgaggcaggagaatcacttgaacccaggaagcggaggttgcagtgagccctgatcgcaacattgcactccagcctgggcgacagagcaagactccatctcaaaaacaaaacaaaacaaaacaaaaaacaacaacaaactgctgtgaacatgggtgtgcaagtatctgtttgaaaccatgcttcagttctttggatatttacccagaagtggaattgctgggtcctatgattattctatttttaattttgggaggaactgtgctccacggcagctgcacccttttccattcccaccagcaatgcacacgggttccagcatctccacatcctcaccaacacttgtgattttctggctagccaatagtttttgaatggatgcacgcatggctggtggctcgctctggcagtttagtgaaacgccgttatttgcaaatccaccgaaagcatgagtgaaatgtgtgctagctcagctcggtaattccatcctggagcctgaaggcagttttgagacacacgggcagccgggttcagacctccagtcccccagggaaggttgggggaaggtgcactggcagctgccatttttgtgcagaggtggcctggctggcagtgcagggaagctggggaggcccccaccctctctcctggaggcacgagttgggtggctcttcctgcccttgctggctttggctggagctggggttattttgggtctggtcaggggccacccgtgacacactcctctcctgctcattgcctttggagcccgcccacgccagcccctagctgtcacagcctcatggttgtgttggaggagctgattttggcaggtcgaggacctctccccagagccccggcagggctgggaggtgtgggctttgcagctaggtgccactgcagccaccatccctccctctggggccttgggcaggctacccaacaggactctcagaagctgtttgctctgagcctggaagatggaacgagcactgagaagagcttgacctgataaaggggtggaaggttgggcccagagtcagccccccgccgctttttggttttcaaatcagcaggaacattgtgcgggtgaagcctagtgctcagaggagtgacgcggccactctggtgacaaaactgggcctcctggctctgactccagacaccatactacattctgtctttctttttttaaaaaaagaggccaggcatggtagctcacgcctgtaatcccagcacttcgggaggctgaggcggggggatcacccgagctcaggagttccagaccagcctggccaacacagtgaaaccccgtctctacaaaaatagaaaagttagccaggtgtggtggcgcatgcctgtagtcccagctactggggaggctgaggcaggagaatcgcttgaacccgagacgcagaggctgcagtgagctgagatcacactactacactccagcctaactccatctcaaagaaagaaagaaagagagaaagagagaaagggaaagagagagagagagagaaagaaaaacagagagaaagaaagaaagaggaagagaaggaaagagagaaagggagaaagagagagagagagagaaagagagaaagaaagaaagagagaaaaagaaaagaaaagaaagaaagagggtcttaccatgttgcccagactggtctcgaattcctgggctcaactggtcttcccacctcatcctctcaatgtgctggcattactggtgtgaaccactgtgcccggccaagcctttctaactaaatgctaattgagctccttctgtatgccactggggcactgtgtatttctctctctgtgtctgtgggagcagggaaggggaggctcaaaggtgagagcacccccacccccgaggatctcgtgccctgggccccctgcgcacagagccttggcccagcccacccctcacccacaggatggtgcaggagcagtgctgccacagccagctggaggagctgcactgtgccacgggcatcagcctggccaacgagcaggaccgctgtgccacgccccacggtgacaacgccagcctggaggccacatttgtgaaggtgagagccaaagaccatgtggggtcgctgcccgtccccactagtcggcagacccaggccctcccagccaagcggcactgtctgtcagcgctccctgcctcaggccacctttctttgtgagcagctgggggttcctgggccaggagggaggtggaaaaccccactgtttctccccctccactgtagccgtaaaccccggaggacacctggggccgagtctcccacgaggccggggggtgaagtgagctggccttgccctgagaaccgcctgtctccaggcattgggcagatgcagaagtcaaagcagggctcctcctgggcttccagaatcttcttctcaattcagggtcggcaccctcaccctacccaggaggctctcaggcttctctacccacagactcgtcagggtccagaggtaaaaatgggccctcactaagacctctgataagatctgacctctataacgaccctaaaagaggaaactgaggttcagagaggcccagcctccaaaatggcctctctgcagtcctgtcagggacccagacgggatcctgccctgaaggtaagctgtgaataaatggcatagtcctcttccctgagtgctcctaggaccctacgtgctagcaggtcactcaggaccgctatggccgtggaagggctgtgtctttgcaagaggtggaaaggtgcctgacagcattgcctacaggcagtaaacccaaggtgtccaggccatccctcccttaccacccagccagcaaggaaaacaagcccggccaggaggaacttgggcctggaggagctcgggtttggaagctgggcttctgttggaggtgccagatgacgaaaatgcattccctggaagaagcttcccgttcctagttaggaaggtgatggaataattttaagaagcaagaatctgaatgaagtctggattccaggagagggtgtgggagctcctttgtggggattctccacatagattgggctgtggagggactccgtgtggaggagttgggggtcccgagtcccctgcccaccttggcctgtgtgggctttcacagggcagggctctggcccaggagagagctgggtggggtgatggtgggggtgcctgggaaccaggactttgggcgtttcatgactgcccccgcaccctcccacccaacacccaatgcagggctgggccttgcagatgccgtcggtccggcacacagctgtgcccatgtccccagacttgagaggtgtggaaaaagcacagaacattctagcaggagtgggaacagatcgctctggcagatgagcgacttgtgtttccaggaaggattactcacaccccaaaagatggatgaggtgactgatgctccctacactttctggcagcggagggcgtagaataagcagcctggaagacccatcagtgccacataactgaggcaaagctacacctcctggctcctgctggggactgtttagaaagttctgtgctcctcttaggataaccacttaataaagactgaaggagggcttttcgtgtgtcagggcaaatgttgcttctgggactcaggtgtgaggccacagggacttggaagtaactattgggacctgggcccaggtggcagacagccaccctgtcctttgaccttgcttgatgactcgtcttgaagttcctgtgctttcaaatgcacggtgcaattcctgctgccagaacccctctaactcaaaaacggagaggcagcatgcatgtgtgtcatttttccgggcatggtagagaaatctcagaccatgcaaaaggaacagaactttggagctggtgcatggtgctataagaagctccctcttcctggatgtgtgcgagcagagccgggtggtctctgggcggggcagggatgttgaggggtgcaattgcatgttggggtggggaggggaggtggatgccaggccctttaagcttcctttcaaaactgggacctagatgatttggagtagggggatggccttgctttgctatttgttgctgacatttagaagtggtatctaagccagacttgagtcatcactctacaggttgtgtggacagggggctcagagaggcctcccctgaggcctctcgtggaccccgctgggctgtctgcccgctcctccatctgggatctccacctgtgtttgcagaggtgctgccattgctgtctgctggggagggcggcccaggcccagggccagagctgcgagtacagcctcatggttggctaccagtgtggacaggtcttccgggcatgctgtgtcaagagccaggagaccggagatttggatgtcgggggcctccaagaaacgggtaactttcccccttccttccctaatgagcagtgtattaaggttctccgggatgtgtatatagagcgagagtggagagagagagattttaaggacttggctcatgtgatcgtgggggctggcaagtccaaaatctgcagggcaggccttcaggctggagccccagggaaggaggggcattgcagctggagttcaaaggcagtgtgttggcagaacgccgccttccccggggaggccagtcttttttctctgaaggccttctgctgattgagtgaggcccacccacggtatgaagatgatctgcttttctcagcatcaacagacttacatgttaatctctttttttttttgagacagaatctctctctgtcacccaggctggagtgcagtgcagtggtgtgatcttggctcacggcaacctccgcctcccgggttcaagtgattcttgtgcctcagcctcccgagtagctgggattacaggtgtacactaccacacctggctaatttttgtatttttagtagggatggggtttcaccatgttggccaggctgatctggaactcctgacctcaggtaatccacctgcctcagcttcccaaagtgctaggattacaggtgtgagccatcgtgcctggccaatattaatctctaaaatatagcttcacagcaacatccaggctagtgtttgactaaatatttgagtaccataccccagcccaattgacacttacgatgaaccattacaggtaacacgtgcatccgtgtcaccattgccttaactcagcacggactgactccggttgtcggagccattcatgtttgtgaccttatctgaaagccgctgtcctggagtgacgctgagtgcttggagtctgggatcggacaaatctgtgctcccatccgggtcctaatgtgtaccttggtcccctcatctgggaagtggggatagttgcagtcctacttcatcaggtgctgggaggatggagtgcgagattgggtgtcaagggttgggtagagcacctggccccataaatgtctgccctcaccatctgcccttgtcccttcagctgcccggggcagcatgggtggctggccttgctcccacttcttgggtgagggtctgatgctgaagatcgcacagccgacacgtggaggagggagagcctggccttccacctcctggccagtgccctctccatctggagctgacgatgtatgggcgagcagctgggggccatcgctggctaatagctggctatgctctgtcaaatcatagacacttactcagcaaaggggcatgtgaccccaagagcagcttcaagagcgctctcagctgtgtgcccccccgttctgtgtcctcgccctgcatttctgtgtggttcagttacagggttcaggagactttgtggctgtccagtagcctcttacacttaggccacggtttcttgtgctgtaacagaattaacctggaagaaggcaggactccgcctgggccaagcttgctgtgtagttttcggcctgttccctcctctctctgagctttgcccccactctcctaaaaaataaaagaggtgtgagctgggcacggtggctcacgcctgtaatcccagcactttgggaggccgaggcaggcggatcacctgaggtcaggagttcgagactagcctggccaacatggggaaaccctgtctctactaaaaatacaaaaattagctgggcgtggtggcgggcgcctgtaatcccagctacttgggaggctgaggcagggagaatcgcttgaacctgggaggcggaggttgcagtgagccgagatggcgccattgcattccagcctgggtgacagaacgagactcagtctcaaaaaaaataataaaataaataaagaggtggggaggtgccggaaggggcgaaagggaagaaccctcagacctgtagtctctaagtcaaggtaatggctgtagggtcctgggtgacacggaacctttcacttcttgttcttaggttttcaagtccaggctgtagggcccctggtcacagaggacccgggtcacccgggactcatctttcacttattgttcttagtttttcaagtccagggccccatggatgccactgagatgatttcagatgttacagtcatcaagagggattggggccgcattctgcctcattccttggcttttgaaatcagagacgacattttcactttaaacaaacccaaaccattcctgctggtggaggatttctcctgcatctcgggggtggattttcactgatttatgtctgcagcgtgagcagtctctgggcttttctgcagctccagatgttagatgttttatctctccgtcttttatctgcttcagtccttgccccagactatcctcgcatgctccctcctctgggagggcttcctgtcttcacagccgcaccttcctcccactgctaccagtgccatggacccactgtatgtttcctgggggccatgcagaaggtccccagaccagtgctggcctgcgacaaataagtacagaaatggagaataacccttttcaaacacataatagcatttgatagaatcaatcaggagactcaagtttttactgcgtgcattgctttagacttggagggcgtgtgttggttgttagcaaggctgtgactgcatttgctgagatggtcaagtaatttggactatgggaatatcacccagcatgaagtcaatgattacaggcctttgtgtctgtggtctttctgttataactgatcttttttttttgaaacggagtctcgctcttgttgcccaggctggagtgcaatggtgtgatcttgactcactgcaacctccgactcctgagttcaagcgattatcctgcctcaacttcctgagtacctgagattacaggtgcatgccgctacacctggctaatttttgtatttttagtagagacagcatttcaccgtgttggccaggatggtcttgaactcctgacctcaggtgatccgcctgcctcggcctcccaaagtgctgggattacaggtgcccgccaccacgcctggcctataattgatcagatatcaattatacattttcaagtgtaattctagcttaaagaggataaagttaatacttagctgtttatataagatgttcaaatgggcattactgcctgatagtgacaagaagagagaatgttgggagtttcttttaagataagatgggtgtttggataaatgtctgacttggtctttttcccccttagataagatcattgaggttgaggaggaacaagaggacccatatctgaatgaccgctgccgaggtgagactcgggcgtctcccatcagttggtatttaaacaaaccccaaggggccagcaaggtggctcaggcctgtaatcctagtactttgggaagccaaggcaggaggattccttgagcccaggaggttgtggctgcagtgagctatgactgcacctttgcactctagcctgggcaacagagctggaccccgtctcaaaaacaaaaaaacaaacaaacaaaaagcaaaaccaaggaatctcggtgctgatctcactggaagttggaatccaggttttgctttggtttaccctgcaaagtaccctttggctgggagccagccatgagccacttccaccctgaggagtcgtggactcccagctcctccttccctttccccttccagatctagggctggctggggaggggaagggtgggcttaccaaggaggggccctggtgaggccctgctggggagggtggcccaggcccagggccagagctggtgtggaaagcctgcacgttaccgagcccccaggccttgtgaaggtgacagaggcctccctcaggctctcaggggagaggagggggctcagcgttccctgcctttgtgcccctggagccccagccacggttctgtcaccattggtgatattcatttgcctcacagggagatgtctgcacatttaactaagggcctcgcaggtttgtttttcatatgataaaactgcttttctttcatggaacattctggcatgtctagacctgcagatctgcctcacaagctctttcagtggttccccctgtggttagggtgttaattaggggccagtttaatccttaaatgatgcagtcagtgtacagtgacagttggtccaggggcgctgtccaggggcctggtggagggaggaagggagtgacctagagccccagcaagcctcagggctatgggaggagctttctgggaaggggagagctggtctgcaaggaggaggtgggattagctgggaaaataaccctgaaacggtcctcagggagacctgaagccttgtaaagggcacggacccactgtagcagggtactgggaggcagtgggctggggaaggaggtggggttacagggccagagagaggggccctagaaacaggcaggctggcagcagttagaagtgtatctcgtagaatctttccctggttgaggcttatcctgatgagatttgcactctgagcatcactctggccaccctgtaggaagaacaggttgtggggtgcttctgggctatgcagaaagaccaggtaggaggctgtggccacagccaggtgggcagctgcaggaactgaggccatggtagtgggcttggagcagtgggacagctcgagagttcagtgaggagcaggtacatgaggcctagttggggcctggccttccacgtggagcccacacccccatgtctgtgaccggcagtgagctcttctctgccttgccccttccaggtccaccccagcctacaaagggcaccctgcacaccacctgattttccagacggggaggttgggacctgaagccgcaggccctggggggtgtccagagccagagcctgggggtctcccagtagggcagcaggtgggctccagccaggtcagcctgccttcctgggttcatctgcccagagggcgttttctatgacccagcctgaacggagctagaaaccaggcggtgcctgggtgcgtccatccctggctcatgcacgctgtgcttccaggaggcgggccctgcaagcagcagtgccgagacacgggtgacgaggtggtctgctcctgcttcgtgggctaccagctgctgtctgatggtgtctcctgtgaaggtaatgtccctatcccaggtgccagcaggactggccggtcactgtgcttgggagctctgtgctggaggactgaccagggcctgccttctacaacccagaccccattcaggggtggagagcagcccaggacgcgctttctcgtgttcgctggagtttgcagcgcagaggcccctgccgagacttccctccaagacaatataagcactggggttgggaaagaggatggagttggggtctaaccaggttccggatccaggatctgctgagtggccttgggcacatccttcagcctctcctggcccctgcgtctgtgagatgggggagatggagaagatgctgcccctccatggggttcttgaggaccacataactacagtctcagaaaaagcagtagatatgaacgttagcaggggagagaaatcactgctttcgactccgtgcagtccacagcccggatgtgcacatggtggacctgagctcagtttgcgagggtgcagggaagcacttccaccgtggctttggcacattccttcctaggatgtattaggatgggtcgttcttgctggtcacccccgcactgcctcggtctctcctagatgtcaatgaatgcatcacgggcagccacagctgccggcttggagaatcctgcatcaacacagtgggctctttccgctgccagcgggacagcagctgcgggactggctatgagctcacagaggacaatagctgcaaaggtacagcatgcgctccgagtctgcaaacctggtcttccaggcgtagatacggcgcggtgggaagggcagctctggggtctgggctcccgcagtcctgcgccctctgtggctgcctgggcgactgcctgctcatctgcaggagggaggtggttatacccaccagggtgtctggacaggtgggatggaaggtgaaagtgcttgccaataatgttcagaacattgaaaaagttgacagtagtgcaccggtgccagctagttcagctgttaggaaagatttacgttcttatggtgcagagtaaacgatggcagatttgggtttctaaaaaggctcagtgcatgactatttaaaatcaagaccagggatgaatttcaggttctcacatgtactttctacaaaaaaaaaaaaaaaaaaaaaaaaaagcaaaaacaaaaatcccacaactgtttttgcacaacagctgccttccatccaaatccaggcttccttgaagttcaaagcatatccccttccactgcataaacacatggcatttctggctgccagcctttccccgccaagccttaggtgttatttggcagatggggaggctctgatgaggatcgtttagaacacagttttgcagagggtttcaagcctttcagaaggacaaatccacttgtgtaaaaatgtcactcactgtatcatgagagtgacttcaaagcatggcacaccccttctgacatctgagggccacagagcaaattctgtcctccccacccccgcacaccagctgggtggtttggacccctagagcccagtggctgagccagctgagtatacacatttgaccatttgacagccatgaacttcaagggaagggcagcccatcacatcccatcatgactgtaacccttgttaatatctggattattgtgaagacttcagaatggatatgtttatagagactgtgtttgttgccactaagataattgctttatgatctaaactaaacatacacttagcctgaatgaatactaatatatatatacctgccaggaaaatgccagggtgatttattataacagacagtttgcctcataagagccttgggaaaaaaagtcagctttttaagtctttagcaactggagcacgatttggctcagtgaagtcttttttgtgtatgatttctctattagaatgttttgggttatagtctgagtaatgcgcattagaaaaaagctttcttgtgattttaaagtgttgtaagatgcttctggcaggactcttgctaacaatttcctttttttatgatgtaccagatattgacgagtgtgagagtggtattcataactgcctccccgattttatctgtcagaatactctgggatccttccgctgccgacccaagctacagtgcaagagtggctttatacaagatgctctaggcaactgtattggtaagaggtgtgccgccaggattagcgggttattccaggaggggtcagcgacctagccttggggcaggcctctagaatctgcggggccgcatggtatacagaacaggggttggcaaactttttgtgtaaagggctggacagcaaatagagcaaatactttagccgttgtgggccatatggtctctgtcataatagtcaactctgctgttatagtctaaagcggccaagggccatctgtaaacaaatgggtgtggctgtgttccaataaaactttatttacaaaaataggcagtaggctggatttggcccaaggaccacagtttgctgatctgggtttagattaaagagcttgggttttggagttagagtgacccaagaaaattacttctgagctttaattttttcctctataaaatgggagtaatcataatacctggcttagagacttgaggccaggattaggcgagtacttgcgaagtactggtacacaggaagcactcggtgagtggtgattccctgccacaggcatttagcctattaaaaaattattttaaaaaatacttggctgggcacagtgggtcacgcctgtaatcctagcactttgggaggccaaggcaggaggattgcttgagcccaggtttttgaggccagcctgggcaatatagcgagaccccatcactacaaaaaattagctgggtgtagtggcgcatgcctacagtcccagctacttgggaggctgaggtgggaggatcccttgagcagggaggtcgaggctgcagtgagctgtgatcgtgctactgcactccagtctgggcaacagagcaagaccctgtctcaaaaataaaataaaatataaaaataaaaaacagtctgtgttagtatttgaattcatagagacagaaagtagaatggaaggtgccggggctgggcagggtgggggatggggagtgagtgtttcctgggcgcagagtttcagtttgagaagatgaaaaagttctggagatggatgggggtgatggtggcacgacagtgtgaatgcagtaatgcccctgaaccgtctacttaaaatggttacgatggcagattttgtgttacataaaatttgtagttcacatgtagttcaccacaatgagaaaagaaactctggccaggcacggtggctcacacttgtaatcccagcactttgggaggccgaggagggtggatcacctgaggtcaggagtttgagaccagcctgaccaatatagtgaaaccccatctctactaaaaatacaaaaattagctgggcgtagtgatgggcgcctgtaatcccagctgcttaggaggctgaggcagcagaatcgcttgagcctgggaggcagaggttgcagtgagctgagatcacgccactgtactccagcctgggtgacagagtgagactccatctcaaaaaagaaaaaaaaaaagaaattgctgatatcagagaaatactaatatgaaaagagagaatcccatgtgaacttagtatgaatttaggaggcctgggcaagaccgctcacgctagaggagctgtgtggggtgcggccggggagctggccggcctgggttactggttctggaaagacaggaggtgagtcctgctttccccagccgttgtcaggttaactgcctggctaggccgctgcagtcagcgcttaagtcctgatccaccggctctccctcggcctctgcttggcagacgcccctgggtcctgcctttgaggtcagagagactttttaggagaagaggtgaggaatccgagctacagatcacactagtcagaacctccccacctggggtggccccatcacctctcccctgccatgagcaagggggtatacatttccatcttgcttcgatttcaacttttccttagcgaaatctgtattgatcatttatttgaaatagtggtttggagagagagctcttcccccactgcattatttttaaccactgagatatttaaagataagtggatgtggccgggcacagtgactcacgcctgtaattctggtactttgggaggccaaggcgggtggatcacttgaggtcaggagttcgagaccagcctgaccaatatggtgaaaccccgtctctactaaaaatacaaaaattagccgggtgtggtggtgggcaccttgtaatcccagctactcaagatgctgaggcaggagaatcgcttgaacccaggaggtggaggttgtagtgagccaagatcgtgccactgcactccagcctggacaacagagcaagactctgtgtcaaaaaaaaaaaaaagataaaaagacaagtggaacagtgagcccttaggacaggggcctcgtctgaaacccgccccagccttcctctgttacagcttccctgtcatcccctgggggagacttctgagctggggcgctgtggctcagctgccagttggcccctcgccagtcccttgccagcagggaggggtggttttcgctcagcgcagggggtggtgagcagggaagccatgggctctccgggaccagcggggaggatagtcctgctcagacttgcagcctgctcaaaggggggtccggaggaggctggcgtcgactgaggatggaaaccctgactcatggcaaaatcagccccgatttccacaaagaggcaatgtttgcaagtctcaacctagccctgactttcctctctacagggtgcagcactgtgtatgggctgaggctcgggagccgtccccttactgtccttccaggactggcaagcaggctgtgggctgaaggccagcctggcggcactgagctgttccgtgccatctccctgggtcctcagtgacagcatcgaaagccaaatgttcagctccctcagggtccccttagcttgggatgctgggatgaggatggggttccccttttcatgtgctctcaatccttgcaatcaagctcaggaatcattgttttaaaagatctctatttatttcaaaaattatgtatgtcttgacttataaatcagcaaacaaaacctaagtgtaggaagtaaacgctcctcccctggccaatcctgcccgcctcttggcagggtccatgagcccttctgggctctgctcccttgagactttttgtttttttatgaaaatgggatcagactgttctgccacttgcttttcccccccacttgacagggtatttagaaatcatttcatggcagcacctttatgttatctttttaaaaatgactgcatcagcagaaatacgtctttctaaggagaaaatacatcaagatagaaggtagtttcaggccgtctgggagagggctgaaaaggttctatgtcaggtcctggtcccccagcacgcaccctgggtcctctgctcccacacctctgcccatggtacccgctccctcacccaggaacagcatggtccgtggtgggaagcgttgatttccttgtgtagccagaatccatcttcctggagctcctagaaccatcctggggccccaagagcccatccgagcctcctgcctgtagcagaagagctcttcctgcagagctagtacaagggatgggtcagggtcccagaaagtggaggtctctgcccctatcatgcatggagaattttctagaaccttaaggttgggtcaccgagggctttgagaccagcatggctttgtcgggttttctttgctcttttcttcaaattccctcctcctgctgctgtattcctttctccttctcctcctcctcttccccctcccatcctccccctcccttctcctcttcccctccccctcccctcccacttccctcctccccctccttcccttccccttctctccctccccgcctccccctttccctccttcttttcttcttttttttttttttttgagacagtctcactgtcacccaggctggagtgcagtggtgcaatcttggctcactgcaacctccaccctgctgggttcaagcagttctcctgtctcagcctcccaagtagctgggattacaggtgcccacaaccatgcctggctaatttttgtattttcagtagagatggggttttgccgtgttggccaggttggtctcgagctcttgatctcaggtgatccacccctcggcttcccaaagtgctgggattgcaggcgtgagccaccacgcccagcctcttcctttcttcttgagtggggaggaaggaatgggccagggcttcccacgtgccctggctgaccttgcctggggatgtcggcaggtcctggggcaggaaggggttccactgaatctaggaagcactgggtgaagccaagtgaacggggaccttggtagcttgggcttttcccatgtgaatccctgagagggagagatcgggtgccctgttcccaaactcaccctatgctttacattgatttgctgtctgtttattcattcccattcattcattcattgatagccaggtcttacccctgtggagtgcacgatgttctgagggacactgttgttctgtggaacagagtttggggaatctagtctgagtgaggaacctgcagcgccagtgggaaggcagccaccgctctgctaaacgctgcatttattcgtgttacagggcaggggccacccagctgtttctctaaagggctagatggtaactaacaacttcagtctctgtggcaaccactcaactctgccttttgcagtgtaaaagcacccctgagcaatgcataacagagtgggcctggttgcacgctaataaaactttatttacaaaagcaggtgtaagccgggtttgaaccaagggccatcatttgctggccactgatttaagggagctggaaagcaggagaccctgattctagacctaggccctggttggcccctgacttcagccatgagcccagagtcattcagtctctggaccttggtttcctgtttataaagtgcaggcagtaatgatagtgatacctgcctcacctcacttgcaggctggctgtggtgctcgagagcggtcatggatgtaaaagcttttgtaaactgtaaattgctgcacggtcagcgcgaagggctgactcatttgactgaggagggtggacttggctggcagggagaggggtacagctgtcctcctttctgacttacgctcaagggtcttccaccatcactccctctctttgttcccccataccagatgctttgtaagtgtctgagcaaggttctccaaggtgatgtttagatgcttaggtccttttccactccctctatcaggaagtgcaatctgtgtattcttcctccgaatttgagcagaaggagggtatccctgtgtagcatggccctcctggaccattcatgggttcacacttgctcattgtatgtcatcaaaggtaaatgccccacggtccccatgtcagagatgtgtccactcaaggaaggagactgccgtgcagtgagctcagggagccatggcacctcccgggtgggcctggctcagcataggccctgtgaagcccagtcatcggaggggcctagagccttgctgggagtcagagttgctggcaccacgtggacagtcacctgtctccttaataccgtgcccagtgtgtggagtagatgaatgcaggagaagccaggcaggcaggtcccgatttggcgcagcgaacgatggaggtgctggagatttagggacaggaagaagggccagagaggtggtgtttgaggcggtatgcagtgataaaatttgggagccagctgggaggcggctgtgtggtccagagtgagggggttgagcccctccatttgtggttttgcaaagaggtgggaaggggagtttctttggagatccagtttttgggttctggaacaccctccaggtttaaccacatggtctctgtcttttcccgctgtagatatcaatgagtgtttgagtatcagtgccccgtgccctattgggcatacatgcatcaacacagagggctcctacacgtgccagaagaacgtgcccaactgtggccgtggctaccatctcaacgaggagggaacgcgctgtgttggttggtattaagaaaacaaatctgaaatccactttcctgtctgcttccagcatgcaccctgccttctctggaagcagaaagttgatccccaaagcaaagccatttctatcagcccatccatcccactgtcagttcccaagcatggggcttcattgtcttgcctggactggtgcaccagcccgtctactgcctcagccttgtctggcttgtcctgagcccaaagctctcgcaccccaccctgtttacagttccatcagctccccgttggtgacaaaggatggatgcctctgcttacagtccagtcccccagagctggcccaactccacaaaccttgtaattcaggcaatgtgggtctgccactccccacacaagcactgtcctttcctctctgtgtgggtgtttgctctcacgtcattccctctgcccacctgctcctacgttcctttggatccagggcacccagcctgcctagatcccgccagggaaggagccttcctcgcataacccccaggacacttcttcagtgtctccctgggttcctgggcacttcctaccttaatgagagtcattgctggcctgccagccaggtagggctgcctctgggtcagctatcttcccagtccagggcccggcactcagtaggtgctctgtgaagtcgtgttgaaatggaatgcctgtttccatgtccatgtgttcctttcttgctttcctttctgatcatcttggggggaaaaaacccaaactaaaggttttcatcatggctttctttctcctttgcaagatgtggacgagtgcgcgccacctgctgagccctgtgggaagggacatcgctgcgtgaactctcccggcagtttccgctgcgaatgcaagacgggttactattttgacggcatcagcaggatgtgtgtcggtgcgtggggggccccgcaggcctcgggggaacccagccacgtggcaccagggacacatttctgtggcacctcgagtgatgtggtctgatcctcatctcagataatcccaagtgcaggcagaccctgagagaagatcctgagtcaggagaccccattctagccccagctctgctgctgcccagccaggcggccactggcaccacccccctgtgtgtgagcctgctccccatctgtggaaaggggttctgcttgacccaggacctccaagtgctgatgagccaggtctacacatgtgggcagcatcagcgatttcctggagattcaccgctgagctgtagatccccaggagctagagatgtgtgcctttagcccagggcagcgaggggaaaagttgaccaggagtggggtcaggtcttgtctagccagtgcctgctgtcaccaaacctaggtgctcagggaagcctggcagctgccaaccactcccccaaagtgggcactttgctagatcctggcagaccctccttgtgggtcctggggaggaggactggcaggagggcacaagttcagatgtgctgccgcagaaggagcacgaggctcgcccaccaggcaggcacagcgcggcagtcccggctctcccactgacttcccgcatgctcgggacaagtcactttgcattccttgtctgagaaatgaggctggaggccaggcgcgatggctcatgcctgtaatcccagcactttgggaggctaaggcaggtgaatcacttgaggtcaggagtttgagaccagcctggccaacatgacgaaacctcatctctacaaaaaatacaaaaattagccgggcgtggtggcacatgcctgtaatccctgttacttgggaggctgaggcaggagaatcacttgaactgggaggcggaggttgcagtgagctgagatcatgccactgcaatccagcctaggagacagagcgagactccatctcaaagatgaaggaaaaaaaagaaatgaggctggaggaggtggaggacaaaggacatgagctggccttactaggagggtggagtgtggtgccactgtgttggacattgccctgagtcagcccacccctcactttcagatgtcaacgagtgccagcgctaccccgggcgcctgtgtggccacaagtgcgagaacacgctgggctcctacctctgcagctgttccgtgggcttccggctctctgtggatggcaggtcatgtgaaggtgaggctggggccccgtccactcacctcccccaggtcaccttcctcctggggaagccacccttctgcagaccggtttgcagcagatccgcgatggtttccctgttaaatgacatgttagcaggggaagtgcctgtaaaatattgttcatcagagaggactgcccgcctgcccacccgatttctcctgatgacatccaccctccgaggccgtgtcggggttcataggctgcggcagaggccatgcgggatgtggctaggattatggggcttggagcatgacacccacgagtcacagggccttggttatgcccgacctctccctgcctccgtgtcctccccggggagaggggttgatgtgtgaaacagcagcgaaaactggacacttgttttgcacaaagacagtgtgtgggttttaatcagatgctgcctaggggagacaggcctctgtgtccattgatctcaagtcacccaaacaaaaggagggaggctttgtaaatgacgagctgtgagaggaagtactgaggcctttagggcgtgggtcactgtgcacctgcctctaacttctttttttttttttgagacggagtctcgctctgtcacccaggctggagtgcaatgctacgatctcggctcactgcaacctccgcctcccgggttcaagcgattcccctgcctcagcctcccgaatagctgggattacaggtgcacaccaccatgcccagctaatttttgtatttttagtagagatgaggtttcaccatgttggccaggctggtcttgaactcctgacctcagatgatccgcccacctcggcctcccaaagtgctggcattacaggcgtgagccaccgcgcccggcctgcctctaacttcgtgttggagttaggctttccccacccgcagagacagggagaagcaccctggccttccggatgacgacattccccaggcatgtccccagcccttgagaaagacactccttggttgcacatctcaaagggacagagaaaccgtttacatttgcaagtttttctaaagtagatgcttctaaggaacatggaggtcagcgcctgtagtcaggtttgggctggaaccaagagaaaattcttttggcagcattgatctttctcagacaggcatgtcaagggggctgggtctacatcctggatacctggtcttgggccaatggcagccacgctgaagttgggtcaggtctcttggtatgtgggggttggacagagttgttcctgccaacagtcttgtggttctcagataacaccaacctcctgggctgatgggaaggtcacatgaactgcatgtcagcccagggcctggcacatactaggtgcttggcagatgtcgtgtcttgtatacggattaggttctgagctgagcagacactgagagctttggatggccctccacaatcgtccacattgccgatgacaccctgtttggtgccgtgcactggctcacaggacagcttctgcagcctgactcaaacatggcaggtcctaacattttgccgtgagaattttccttcctgatgagatggtcgcaggggttggatatgccacagtgagctgtggtgtgcatgattctcaaatcggaggacggacggtgtgaggggtcctgggcttagttcacaagaacgtgtatggacaaggaacaagattcacgagttgagtctctcaggcttgtgttcaaacctgacttctgccatttccatggccttgaagaagtaactcagtctttcctgggccatggtgtcctcatctgtaaaacgggcatagtaggaccaaccccatagggggttgtgaggatgaaacgagattaagcatgtgaagagcttatcacagggccaagcacaggatgaagagctggcggtgtggaggctgctggctttattattatttagtagaagtagtgggattcctggcttgtgcttcctctagtcattcataaattgctgaaaagtcggcattcatatccacattagtggacaatattgtggatatagaaccagagcctggccagccttgctatgtgaccttactaaccatttgttaaggtcctgccccgggtgtgtagcaagaactcggtcctgcactggggagtgtctctagcgggggatgagagaccacactggacaggtggaggccaggcctggtgtgtgggggccacagagatgaaacacggggtggaaggctattggacgttctgtgacagccacatagtatagatttaaggcttttccagccacaatctctgttgcaaccgctgaactctgctgtggtagcagagaagtggccagaggaccatggtaaaagaatgagtgtggcagggcacagtggctcacacctgtaatcccagcactttgggaggctgaggcaggtggattacttgaggtcaggagttcgagaccagtatggccaacatcgtgaaaccctgtgtctactaaaaatacaaaaattagccgggcatggtggtgcacacctgtaatcccccagctactcaggaggctgaggcaggagaactgcttgaattcatgtccacatttagtggacaatagcctcccggaggtggagattgcagtgagctgagattgagctacttgtactccagcctgggcgacagacaaagactttgtctcaaaaaaaaaaagagtgaatgtggctgtattctttattttattgttattattattttgagacggagtctcgctctgtcgcccaggctggagtgcagtggtgtgatcttggctcactgcaacctctgcctccttgttcaagcaattctcctgcttcagcctcccgagaagttgtgactacaggtgcgtgccaccatgcctggctaattcttgtatttttagtagagatgggtttcatcatgctggccaggctggtctcgaacccctgacctcgtgatccgcccacctcggcctcccgaagtgctggaattacaggcatgagccaccatgccttgccgggctgtgttctaataaaactttatttataaaaacaagtgttgggacaaatttggcccatagactatgatttgctgacctctgctttaggtaaaggggacagttgagcagtagttcagagttgctgagtggcccagtgagttctgtgcattggagtatgaggagtactggcgtatgggctgggtggccgaggacttccttgtgtgccgtcatctgtttaggatgccatcttggaggtgaagtggagagcacaggatcagatttccatttgagaactagaatggactctggcagccaggtcggggcagacttccaggggccaaggctggaggctatcgctgccatcctggcaggagaagttgtggtcgaagcaggcaggagcagggatggagggtccggagccaccagcgatgacgcctctccctcggccacaccccccgggacctctgtctctccgagtgtgttaacctgagggaggtggagaggagattttctgttcactgaccctgagggctactgtggaggcagggacgtatgatgctctgagcggtgaccctcgttttgtatttcagacatcaatgagtgcagcagcagcccctgtagccaggagtgtgccaacgtctacggctcctaccagtgttactgccggcgaggctaccagctcagcgatgtggatggagtcacctgtgaaggtgcggacgcccctgcctgctgagggggaaagcaccccctggtcttgccatgacacagcagcacggcctctgactttcaaaatccacagggaagagcctgctgggatttcttcacctggcaaaccttccatgtccacccttggaggcaagcgggtggtttgctgttttccctccaactgaggtttttttttttttttttttttttttttgagacacggtcttgctctgttgcccaggctggagtgatatggtgcaatcactgctcactgcagcctcagcttcccaggctcaagtgatcctcccacctcagcctcccaagtagttgggaccataggtgtataccaccatgcctggctaattttttatttttaaaaaattagagacggggccttgctgtgttgcccaggctggtctcgaactccgtggctcaagtgatcctcttgcttcagcctcccaaattgctgggattacaggcatgagccaccgtgcctggcccccaactgaaattctaatatacttttcccatccttaagcgtgagggtgggaaggcagcaaaccactcctgacttgttctttaataaatgtgcacggcggtaattacaacatgcactgggaccttgggccgcatatctcaggtcttggtggtggtgcatggctgagaggtaaggagggggctcagggaccacctatatccctgactcagagctctaactcttcatctgtaacatgatgattaacttcagcctcaccagatcattggaggattaaactagatgacagcaattacaggcaattaagggcaattacgatgattaccattttcatgtaaggtgtgtgtgtattttgtttgcttgtttgtttttgagacagagacagctctgtcacccaggttggagggcagtggtacaaacacggctcactgcagcctccatctcctgggatctagcaattctcccacctctgcctccttgagtagctgggcccacaggcatgcaccagtatgcctgactaacttttttgattttttgtagacacagggtctcactttgttgccgaggctggtctcgaactcctgggctcaagtaaccctcctgcctcagcctcccatgcctgggattccaggcatgagccagtgcacccagctgaggtgtgtttcttattattgaactgtggtccatatttccccctgcccgccacatgcatacttcacaccatgaacttgctgtgtgaccctaggctagtcccatcgcctctctgagcacgatggtctctgaggcttcctgtgttcagcttgtcctgtgctgctgccctcccgggccccagtgcagcccccagggcgatgtagcatggccagcagccatggccaggtgccaggacactgaggctgaggtgggctttgccgttgcagacatcgacgagtgcgccctgcccaccgggggccacatctgctcctaccgctgcatcaacatccctggaagcttccagtgcagctgcccctcgtctggctacaggctggcccccaatggccgcaactgccaaggtgagcaggagggatgccctggggtccctcacgctctgcttggggccctgcaatgtcgtggggctgaggctgggctcgggggctgtgcttccccaacccaagggccacagcacagatggaatgcattcaggaaaaggaggcccaccccatccaaggggtgtcctggggtctgcagcaccctggtctcctacacccaggccccagcacacttgtcctctggattgtctgagcctgtggcggctgcatccggcaggaacacttcagccctcctcccctcccctcagcagccccgtaaaggctggaacagaggcctttaggaagatgcccgccagggaggaagcagtccaggccaggggatggcgtggcctggtgtgggatggcccagggatactcatggctatgggtcagctccagcatcggctaagtaatggtggccaatggcattggttctgcattcagcccccttttctacgaatgctctagggggcagtgtgtgtcccccagagccatctgataaccatccattcaatcactgacagcgggtgctgagtagatgtttgtgagcgcgtgatcctcagtgtacacactgcgcccagaagctgagtcatggaggtggggctgtccagccagttcctcgggagccccacacaggactgtggatcctggggctctggaagccccctgggtcccacagatgtagcttctggtcatgaggaaggtgactttgatgaaaggcaggcaggagctgcggtgtttcctgggaggccccctccgcttgccctgggctctggatggaaggctggttgtgtctgcatttctgacggagcaaatgacttttctcctggccaggctccctcaccacagcctggggtcccgcccagactcagcataaacacattcctgagccgggcctttgaggctggggagtgttgtttttgccaccgatgctcaggcatttggcacctcttaatggatgtctcccagggttggtgacagcccctgagccccactgtttggctgctccagagtctatgggagttgggctgctcccccatctccaggggcctctcagtgtggtgccccaggccccatcccaggagtcccagacctggtggttccagtccaccctgaacagccaccaaccccaacacacaggcaagacgtatgatccctcgaaggctgtttttctcattgttgtgtggagctagcagctcctgcccttttctcctaagaggttgagtcacacctagggtaagggtgctgagcctcgggagccacagagaggctctggttagttagtgtatggactctgatgccagcctgcccgggttcaaagctcagctctgacatttataaaatgtgtgacctcaggcaggtctcttaagctctgtgagctcctcataaaatgaggatcataacagtatctgcctcattgagttcttaggaggattcagtgacttatccttgcgaggtactcccaggacccatcatgtagtgtttacttttaccatcgtcacgctccctccagggattgcgaatgataagttaacactctataaatgtaaataccctataaatgtaagaactggcacaggacgctgctctgaagatcagccagtggagggcagggatggcctgatcgccacccctaaccctagttgatgggaggcctgggctcctccgtctccagatgggtatggctcctgcagcctctgccttcactgtgctgctgtggggtctcttgcagacattgatgagtgtgtgactggcatccacaactgctccatcaacgagacctgcttcaacatccagggcggcttccgctgcctggccttcgagtgccctgagaactaccgccgctccgcagccacgtaagtcccttggaccatgccatcgtcgtctgtctgtgttggccttcctggtgacccagttcccgggtgggtgggttatcaggctgtgacctcggtgtcctcccatgagggactcagggcactcaaagatcacctgatccctggccctcaagcccctaaatgctagtgacactggtctcggaaagtcaagggggtaactgcaaatgagtctggggtctatagtcatgttttcaggccaaggctgtgcacagaaccaggagaaaccacagccctcttttttcctagggtggaagccttgggcaagctctctgggcctcagtttcctcatctgtaacatgcagatgtcagaacgtgctctgactgagatgcataggtagcaatgtctccatgtcagcccaaagccagggagccgatgtgacctgttggacgttgttgttaggtgcccacctgaaagccagaattcgtccagcctggtgaccgtgtgggaacggcatcaaagattccagatcctaaacgtggggctgcgtgcccctatgtctttgtaagctcactcactcctaggccatcacggcgcccacttgagaccacggttcccacttcctatcccccttgcccctaattgtattcagaaagtctcatttagtgccacagtcagttgcttcaggaaaagctccatgctgggaccgatctcaggactgtggacttgtgacctctcccagcactctgagtgcacgatgcaggcagccagctgtttccgaggccttggccccttgaccttcagcctgccttgggctcttggccagctgcccccgcgacctgagggtcagtggtagtgtccacctcttgaccctaggggcagctgccctggcttgtggcatagcaaggcttctgggtacccgagcagccccgttgtccctggcagccctccatattcttcctggctttgcgattctcattggctggcccagccatttccctgtttcccagcacggatttctgtctgcttgaaaacccaacatcttgtttccttcctgagcttgggttaggaaaaagctgccccaaaactgggtttgcaagtctgtagcatcccgaagagctcatggttatgcaacagcctgccccaggcagtgacactgcttctctgagccattaagaaagttcgatggccttggctgcaggctgtgcagccgtctgtcattgtaagttcactctctccccagcctttgtcagcgcctgggcttgaggattccaggaggctggctgtggttgtgacctcgatttctaacttgcgcacagtcgtgaaaccacctttcgaagagggggaggctgccctgcacaggggccctggcgcctcctaagcctgagggtgggcgggttggccatgtgtgctgaggtcatggctgaaatcaggggaacccagctccacccctcatgttggctgtggaagcctctgccacccctcagtgctggagaaagtcgtttcttcctggacctactgcgtgcaggcacctgggtagacagcccacagagggctttgtccccgcacaggctccgccttcggcgtgtgtgctaggagggaggaggggaccccacctggctgggcgtgagggtgggcagggggctgtctggagtgggccatgcctgcatggaggtggaagggggagcgaattaggcagaagcggcgggagtatggacacatgtgcggtgaaatggggagttcagcctgaaacctgggccctgtgtgctgtgcagtaagggattgagctgctgggcgcctggcttgttccagcccttggactcccgggactgatagtgaggaggggccaccccctctcagcactgctaacccctcagactggagttttgtattttacagccccttttcctgctcatcaaaaatcgaagctgcttaacacgttttttcatctaagcttcagaaagcaatttttaaaatctaaaagagccatatttaggagggacccatggccggcgcttctgtggttaacaactcagcaagagcgcctccttcgggagccttgacagacaggactgcagagtccgctgctgtgcctttctctctctctccactcagacggcttccatctggggaacatcccggcggccgagggctggtaactggagcatgacccaggaagctgggccgcaaaccacagggctcggccttgtggacaggaccaggctgttacagtcctgcccacacaattcccttctgcccgcaggaggaagtgtgcaaagctgtcccacagcctttcatggggccggacacatcctctttatcccctcagtggggccggcgcctgatgacctgtggtctagaaagctggagcaaagccgggtggccttggttgccgcttcccggggatgggacacgagtgaacagctgtgggcctgagggtgtaacacggtggacggtggcagagatagagccgtcgatggcccccctgccttggccagttcctggggcttgtctcccggacgacgagcgtgtgaaagtcaggaaaatgccggcagggatatccacaagcacctggggtggccagaactgccgtgcctcccaggagaaggagggggcctagagggccttttttctctggtgtgtggtggcttaggatcatttccatagagcttgaggtgttagggtcaaatgtgttgaactggcaagttggagcacattgtcctctaacgcatgacatggcccaggatgggtggcctgctgaggggacatgtctggaaaccagggcctgcgtggcagggggggacggggcgggctcgcctgtgccctgctctgtaatacattcagtgatgacaacccgtccctgacctagacacactggctaaaagggatttttgggccgttcccagtctgacaggcagtttgccagacagttatgtttctggtgttttaaaaagtttgagtagagcgaagtacgatcattgaagccaggacttaccaggaaaatcaaggacatgtttatttttgtgcattagtcatttgcaaagcacatagcgggtgccccaggccctgctctttgtccagaaggagccagcccagaaactcctagtgtagagaaggttttggggtgctctgaggaatgactgtgtggggtcggagggggagcctccaggggaggagtgaccagtcgctgtgtgtgatgacggcgggagctgcaccagaacaccacgcacacctcccattgctttcctccgcttccctctggcaaaacaaattccatccctggttagtacccgccatgctgagagaagcgggaagccgaaatcccaccagggcgactctagcgccacctgctgaccagccccatccaggctggtcctgaagttgctggtgtgtgtgcgtgtgcgcgtgcttgtgtgtgtgcatacattgtgtgtgtaaaagctttgaagtaagacaggccgactttgaaagccaagcttgccccttacgacacaccacggagctatcagcaagttctgcatcctcaatgggcgtctgtcttccagccagtagagcgggaggacgatgggagacagtggagggagcgagtggaaggaaagtctgctgcttgcagcctgctccctgcacccggaagcgcagttcacctgcacccggaagcacagctcatgggtcccatgctcctcccccagttcacggacgctttggtcatagctcctcagaggcccccctgggggagagctctcagatcgcctggagcactcccgtttggcctggacctgggcatctctggggcaggccaccgccagcagcacccgtgcccaccttctttcctgcctctgttttgggcccctcccaggcaggactcccccgttcagtgcccctgactcccaggccagtcctttctaagagcttggaatgatcactagccaagtaaatgcaaggcctcctgtcagtcctgacaaacctggaaagaggaggtaaaaggagaccccagtctcgataaatgcctcaagcaagtccaagtaacccagcacgagacatggaaacttaaaaagccaaaagggagatgtgatagaaggccaggacgagaggatgctcctgacctcagaatccagacacagcccagatggcagggcttcctggagcacctgggccaggtcctctggggctccgcacctgggccctgcttcctcaggcagccaccttcagagtatgatgggccaggagttcagtacacaggagacgacccctgtcccatcttgtgacaagaaattagaacttgttactatcctgtagcggaagataataccgatctccatcctgtcacaggaggttagaatctgtaacaggaagttggaatctgtgctcatcctatacaggaagttaggacccgtccccgtctccaccacaggaagttaggacccgtccccgtctccaccgcaggaggttaggacccgtccccgtctccaccgcaggaggttaggacccgtccccgtctccaccgcaggaggttgggacccgtccccgtctccaccccaggaggttgggacccgtccgtgtctccaccgcaggaggttgggacccgtctctgtctccaccacaagaagtttggacctgtattagggttctctagagggacagaactaatggaatatacatatatatatatatataaaatggaatatatatatatatatataaaatggaatatatatatggaatatatatataaagtggagtttattaaggattaactcacatgatcacaaggccccacaataggccatctccaggctgaggaacaaggagagcagtctgagtcccaaaaatgaagaaaaaatgagtccaatgtttgagggcaggaagcatccagcacgggagaaagatgtaggctgggaggctaggccagtctctcttttcacgtttttctgcctgcttatgctgtagccgtgctggcagctgattagttggtgcccacccagattaaggatggatctgcctttcccagcccactgactcaaatgtgaatcttttttggcaacaccctcacagacacacccaggatcaatactttgtatccttcaatccaatcaagttgacactcagtattaaccatcacaagtccaccccttgtcaacttgaacccatgcacatctcctgagatcatacataatcttcaaataaagacaataataagatcataattacacctaacataactatacttcatacgaccagaaactcaccaatccccaacccaaatactattatataaagttaacgatacttaaatgctgatgtgaattcaataaatcttatgtcacttgataaaagagaaaggaaataaaatgaagtcatttttgttagtacaagtgtatacatgcacaaacatttttgattgttttttgtttgtgtgttttttaagacagagtctccctctgttgccgaggctgaagtgtggtggtgtgattttgtctcaccgcaacctccacgtcccgagttcaagtgattatcctgcctcagcctcctgagtagctgagattacaggtgtgcaccaccatacccagctaatttttctattttaagtagagatggggtttcaccatgtgggtcaggctggtcttgagctcctgacctcaagtgatcctcccgcctcggcctcccaaaatgctgggattacagtcgtgagccacagcacctggccatgtttttaaaagaaggaggaaatactcacgacaattacagtcctcgtttctgcaactggtcacatggctcgtagctggtattgatgactgccttcttctactacccattctgtattccctttgccttcagcaagcaccttggcagatcttgttttttttttttcctggtggagtgacccaaaccttcattcctgaagggtctgggtcatttgtagtcctgcctggattgggctgttgtagtttcccattgaccttaatcacagggcatggtaatactgagagatgccctaatggatctcctgtattccatgcatactctaacttatcttcattttggagtagtagactgatttcatcttgatagtctgggtcagccaccccagccaacactgtaactcccttcttagcctgttgacttaaaggtaggaggagcttcaagtgtccaggtggcaatcttaatttccagtttaatggaatccttgttctgtctcctggtggcggcgttcctccctctggaactaagacctctaggccagcagaacgtaatgttgcaggaacaggaagcaaaaattttgctagtggatcactaggggtgatggtgagtggtgccacttccatttccacccttggatgcctggacccgtgaatcctggctatgggagaaacagtgccataatattggaccctgattcagagcatacatggccttctgtagaactttgtcccagccctgcaaagtactgtcacctagttggcattgtaattgtgacttcaaaaggccattccactatcctatcaatctacctgcttcacgacgatggggaacatggtaaaaccagtgaattccatgagcatgagcccactgccacacctctttagccgtaaagtgagtgctttggtcagaggcaatgctgtgtggaataccatgagggtggataaggcattctgtgaacccacggatggtagtcttggcagaagcatcgtgtgcaggataggcaaacccatatccagagtaagtgtctattccggtgaggacaaacctctgccatttccatgatggaagaggtccagtataatcaacctgccaccaggtagctggctgatcaccccgaggcatggtgccacatcgagggctcagtgttggtctctgctactggcgaattgggtactcagcagtggccatatccaggtcagccttggtgagtggaagtccatgttgctgagcccatgtgtaacctccatccctgccaccatggccactttgttcatgggtccattgggcaatgacaggggtggctggggaaagaggccgagtggtgtccacagaatgaatcatcctatccacttgattattaaaatcctcctctgctgagctcttttatgtgatatggtgagcactctcatgtgatacaaatatcttcacagtttttgaccactcagagaggtctatccacatacctcttccccaaatttcattgtcatcaattttccaatcatgcttcttccaagtccctgaccatccagccaaaccattggccacagcccatgaatcagtatgtaatcgcacatctggtcatttctccttccatgcaaagtgcacaaccaggtgcattgcttgaagttctgcccactgggaagatttccctttgccactgtccttcagggatgtcctagaaaggggcagtagtgctgcagctgtccactttcgggtggtgcctgcatatcgtgcagaatgatctgtgaaccaggccctagtcttctcttcctctgtcagatgatcgtagggaactctgcatgaggccatcggtgcaggctggagaagagaaggcaagttggcaggagtggagaccacgggcatttgagccacttcctcatgtaacttaacttgtgccttcaggacctgctcaagcccgatcacgtatataccacttccatttgatgatggaatgctgctgttcatgaccaactttatggctagatgggtcagaaagcacccagttcatgataggcagttcaggtcatatggtgacttgatgacccagagtcaaacattcagtttccaccaaagcccagtaacaggccaagagctgtctctcaaaaggagagtagttatctgcagaagatggcagggccttgctccgaaagcctagagaccgccactgtgattcacctatgggggcctgccaaaggctgcagccagcatccttatctgccactgacacctcaagcaacattggatctgctgggtcatatggcccaagtggcagagcaacttgcacaacagcctggacctgtcatagagctttctcctgttctggaccccactcaaaactggcagcctttcaggtcactcgataaatgtgctggagtaacactcaaacgaggaatgtgttgcctccaaaatccaataggcccactaggcgttgtgtctctttcttggttgtaggtggggccaaatgcaggcaacttatccttcaccttggaatatctcgacaggccccaaaccactggacccctagaaattttactgaggtagaaggtccctgaattttattatcagatttattttccatcctctggcatgcaaatgtctcactaataagtccagtgtgtttgctacttctcacttactggatccaatcagcataatgtcaccaatttaatggaccagcgtgatatcttgcagaagcgaaatgcgatcaaggtctctccgaataagattatgacatgaataagattatgacacaaagccggagagttgatacacccctgaggtatgacagtgaaggtatattgctggccttgccagctgaagacaaattgcttctggtgggccttggaacaggaatggagaaaaaggcatttgtcaagtcagtggctacataccaggtaccaagagatatggtaatttgctcaagcaatgaaaccacatctggtacagcagctgcaaattggagtcaccacttggttaaacttacgataatccgctgccgttcaccaagatccatctgtcttctgcacaggccaaatgggagagttgaaccgggatgtggtgggaatcaccaccccgcgtctcaagtttttgatggtgacactaatctctgcaatccctccgggaatacgatattgtttttgatttactgtttttctaggtagaggcagctctcatggcttccatttggcctttccaaccataaaagccctcaccctaccagtcagggagccagtgtgggggttctgccagctgctaagtatgtctctgccaattctgcattctggcactgggaaaatgaccacaggatgagtccggggacccactggacccactgtaagtcagacctgagctaaaactccattaattacctgacctccttaagcccctatttaactggagggccacaatgacgttttgggtcccctggaatcaacctcagctcagaatcagtgtccaatagtccccaaaatgtctgatcatttccctttccccaatgcagttactctggtaaaaggccagaggtctctttggggaaggatgggagaaagattcactgcataaattgtcagtaatgtagtggggtccttcctcaagaggacccgcctccccttcattcaaggggttctgggtctgtaaactggttcaagtctggaaattgattgaggggccgtgattctctttttttgtaattcaaattagtcttttgtccacttgatctagaagttttcggcttatacaaatcaagtaggaatgcagtaggcttcctatcaatttcacttctaggaacactgtgattaattagccaatgccagagctctacacgagacagactattctgattgctgctttgcctctgctgtccattacagaagctacacccaccttgcctttgatggttgagtgctgtcacttggccactgccacctcaggatccaattatttccattgtatttaaattttgtagttgagtgactgtggttcccactgttagatctgacataccaagacgagcaattacagggctcttcaaagatgcaggtgctgccctcacaaatctgtttcgaaagacattggtcaagggtatatcttctgaatcctcccaacttggttgagtaggtctaaagtgactaatccactccaccatcccaatctccctaagtctttggattccttcctctacattaaaccaaggaagaccaagcatttccagcttgctcacagtgggccatctcttcatccgtatttcagctaaaccagcaaataaactattagaaccttttttaactccccgagttgcaacattaaatgcagagtccctgcttagtgggcctaaatctgtaaattcagcctaatccaacgctatgttccttccaccattctccgacacccttaatatccattctcatgcccgttctccagattagtttctataaattagaaaactcaagcagttcttttcgagtgtagctcacttcctcatgggtcacactctcaacctcatctctaggggcccgccaggactttagtctagttataggtctagaggcaaacaggggtgttaggggtggctcctgaggagaatcaacattatcttgcctggcaactgcctcacaggaggccatcactgttgcctcaggcagcgtggggtttatctccttagacaaaggtggaaaggctgatgggtcggggcggggatgttgccactactggggatggggaagctgttaagctgtttcttctggcaaaaaagattcatcagagtttataaactcagtgtccccagcttcatcaggctcctcccacatgtccccattccaagttgcagggtcccattctttttcaatcaatgccctcactttaacagcagacacctggcgaggctgtgcatgcatctttcattgcaggtcagccactcgcatgataagagcttgtgtctgtttttccacaatttcagctcttcctctacaggagataagactctcactcagggcaatcttagcagatttgaggctcagtatctgcttctgaagctgggagatggaatccctgagttcataattttctttcatcactttgtccactaaacttaggagcaaccaaccagcttcattatgttccttggttctccacatatgatcaaagatattatgtatagagtcactaaacttgcctcatgagcgatgaatcaggagtttcaaatgcgtttatttttcataactctctaaacagttcatgccaaggactatcagtgttctccatactattagaagtggagtccttagcatttttggatctaatcgttaaccagccaaccccagaaaccccaaaaccaatgaaagaactccatctttaatattctcttcctctagaaccactcctggtaccaaaatctgtagtagttagggttctctagagggacagaactaacggaatacatatgtataatggagagtttattaagcattaactcacacgatcacaaggtcccacaataggccatctgaaggctgaggagcaaggagagccagtccgagtcccaaaactgaagaacttggagtccgatgttcaagggcaggaagcatccagcacaggagaaagatgtaggctgggaggctaggccagtctctcctatcacatttttctgcctgcttatagtctagccgtgctggcagctgattagattgtgcccacccagattaagggtgggtctgcctttcccagcccactgactcaaatgtgactctcttttggcaacaccctcacagacacacccaggatcaatactttgtatccttcaatccaatcaagttgacactattaaccatcacaggacctgtccccgtctccactgcaggaagttaggacccatccctgtctccacccaggaagttaggacctgtctctgtttctatcacaggaagttgggatctggccctgtggacccagatgggttactgagcttggaacacgagggcttagtgacaaggaactgggaactgacctcaatggctgagtagcgatatggctccctcactcactctgtgaccttgggaagtgggaaggccacattctctctgagcctcagtgtcctcatgtgaaaaatatcaccgaagccactgtcatggggtggtggcagtgatcacactagagagtgcatggtgaggaagagctgagcacttggtaaacggcagcagctctgattgctagtggcagagatagtcatttcatgggtcacctccgagacacaaccaagagccctgcgtagccctggccactgtctgggcaagggcctgggaagggcagggtgtgcctggggagtgcccctggggtggggctctgccagtgagcaggggacgcacctcactccgggcacagcctttggcccccggccacccagcgcccgagatggtgttggaagaggctagtgcctgaatcagcagcctggaggtccacggcgcctcccgcaggtgagtgaggtgtgcccttcgtgttggctgaatcggccagaggggcggcgggaggccccgcctgccagccccgcatccccgcgctctgccgtttctccgcttgctggaccggccctaaccctcttcttgtctctctgcccacttttcttgcagccgctgtgagcgcttgccttgccatgagaatcgggagtgctccaagctgcctctgagaataacctactaccacctctctttccccaccaacatccaagcgcccgcggtggttttccgcatgggcccctccagtgctgtccccggggacagcatgcagctggccatcaccggcggcaatgaggagggctttttcaccacccggaaggtgagcccccacagtggggtggtggccctcaccaagcctgtccccgagcccagggacttgctcctgaccgtcaagatggatctctctcgccacggcaccgtcagctcctttgtggccaagcttttcatctttgtgtctgcagagctctgagcactcgcttcgcgtcgcggggtctccctcctgttgctttcctaaccctgccctccggggcgttaataaagtcttagcaagcgtcccacacagtgagcctcgcgtgccttggttttatttggcatggttgggagtctgtgccgcttgttacccgggggtgagctgggcactggccaccgcctggtacccccgagggctgactgaggagcgctccccactagagggtgtgtgctcgggggtccctgttcacagagcccactgtctgtgccgacagggaggccaggccgggtacatcatttcacatgtgttaacttgtcttcatttgtgttgaacccaaagaataaaggtggtggtggagaagggccctcagattgctgagcacagtcccctctcgttttacagatgtggaaactgaggcccagagagaaggggaagggttggccagggtcgtctggcctgctgtggccatgccaggtcaaggaagcgggtctgctggcccctgcctggttctttgctgtatccccggaggtgagcatttcactgagacaagaaagctctctcctgagattcaagcctcctcttctgtttgtcttgatcagaagcccaaatctgtggtgcagaaacacgggatgcggttgcggctcctaggatgcagctcttgcctcagtgaagtcgttttgcccccactgaggatcctggccctgtgccggggcgaggcaaaggaccacacaatacatgtgatactcaggggatccttcataggccttacaccagtcctgccaggcaggtggtcatcctcatgaagactcagagagggcaagtgatttgcccaagatcacacagctggtatccgagccctggtttactgactccacagatctggctgttgcgttctgccagaatacctccactgagggccttaaccccctgcctccctccatctcctccaccatggtccagccaagccagtcatctgtccccctctgctgctcccagcgtccattcacctcccctacagctcattctttgcttagcagctggagtgatcttttagcctctgcctaaaaccgttcctggcttccttaccatttgggttaaggcctccagatcctcaagatgtctgaaggccgtgcctaatttagtccttgcatgcaatttccagcctggcctcaacttgttctatccttgcccacttcccttgagccacgctgcaagctctgctgcctccggcccttggtacgtgctttgcacccttggcctgaatgttgcttaaactccagctcatgtgcctgcctcagagaggccttccctgccacccctggcttctgttttctctgtccgtccttctcatgacccctttccttcatggtgcttgtaacaggctgcggttcctgttgactcgcgtttcacatttgtcttccgcaccttccagaaggctctgtgaaggcagggaccaggtctatctcattcagtgcggtgttcccagctccttgcaagacatctcgcgtgcagaaggtgctctgtcaatgtctgttcagggaacagatgactctgccagccctggcttatgtcactagcatttctgtggctgtgacactgtgctgacactgtttccaggcagaaatccaagaagggaaggcagaacaccccagcgggatcaagtaaagaggactgcagggttcttccatggaagcaggggttggaggatacccaccttgatgcctagtgaggaagatggacctggacagacagtcagctccacaccttgcgctgagcagctgtgattgtgccacgggagcatgagcccttttccccacggcccttgccactgtctcctggccctctctctgatcatgccaggtttgcaccagcctcgagtctcccatgttgtagtacattctccaagatgcagcccaggagcctctctgaaggaccagtctggttacgatggtctgagcttccttagaaccttccatggttgtcttttcccagcagatgaagcatagcctccttggaatggcatgggaggcctggcctgatctggcctctgcccaccctttgagctgtacctgccccaccccagctcatccatgtgcttgtaccctggccccacggggaggcttgcccttccctgaatctgccttcttgtggctttagcatgtgccatgctgtccccctgcagactgccattctccttgcagacttggctcagaagtcacctcctcagtgcagttagcctgagctcccctggccccaggtgcctccatcagagcatttaccccattgtgttgtggctgttccttaacgtccccactagccaggctctttgagggcagggattgtgtctggttaatttctgtattctctgcaactttgcaatgtttggcttgaagaaggagctcagtaaacatctgaataaacatgcaggttgatggatggatggacagaccaatggatggatggatggatggatggatggatagcatttttaaggcttagttcaaatatcgtctcctcagccaggtgtggtggctcacgcctgtaatcccagcactttgggaggccgaagcaggcagatcagctgaggtcgggagtttgagaccagcctggccaacatggagaaaccccgtctctaccaaaaatacaaaaattagctgggtatggtggcaggcacctgtaatcccagctactcaggaggctgaggcaggagagtcgcttgagcccaggaggcagagattgcagtgagctgagatcggagtatggcacaccagcctgggcaagaagagtgagactctgtctcaaaaaaataagtaaaaattgtctcctctgtttagccagcaagccacagcaggggttcttgtcctattcaggcatccatttgtcaggggcgggattactcaggctggaaggaacacctgtgccttcatgtgcatagcaatgtgaagaggtgggggaaacctctcaggggctttggaggctacccagtgaccttccacagcttgccagaagctcctctgcaacattcccaccaagggactcttctttgcttgtggaactccctgcctcctgaggggtcccgttgcattttgggatcccatcgacgtttgcgtgtgtgcctgagtgcactgtgggagtgacagctgagtgacctgagtgctcacccctgtcccgcagctccttggggctccttagccatgttctcggctcatgctgctgacagaggacaccatgcaggaaaagcaaaataagagcaggaggttgaatttccttcttgccatttactagttctgtgaccctggatacatcgtcagcctttcagagcctcaaggcccaccttatggttgattttgaagatggcctgaaatagtccagcaggcagcgcctgatacagagtaaacactccataggtgtgagtgtgggtttcttcattcattggaaggtaactgggtgttcgtgtggcttttcattgaaatggggatgaagattcagagagtttggagggatccaaggtcatatgtggagctgacatcacttttgattcagaacctgtgctttcctggttgtgtcactagtaaatcaagctcccaaggagaaaagacagcaataagggtgatttttattgtaatgataataataacaactccaacagctaacacatagagtgctgaccatgagacaggcgctgttccaagcatgtaattcgtttactcttcacagcagcctagggaagcaagcagtgctaatatccccattccacagtgaggacagggaggcacagaaaggtgaaggaacttgcccaaagttccacagctggtttccagtggcactgggattcagacgcaggcagcctgggctgggatctgtgctctgatcccctgtcctccactgcagcaaatacgggggagaggcagcatccctgggatgaatgagactgttgctccagccccatctcacagagcccgctctgccattcccaaactcaaaacaggatatcttattagctaaaggaggaggcagtgtggtaaggaggaaagggctatgaggctggaatgaaataagatatgcaaaatgggccaggtgcggtggctcatgcctgtaatcccagcactttgggaggccaaggcaggcagaccactgaaggtcgggagttcaagaccagcctggccaacatgatgaaaccccgtctttaccaaaaatacaacaattagctggtcgtggtggtacacacctgtaatctcagctgctcaggaggctgaggcaggagaactgcttgaacctggaatacagagattccagtgagccaagattgtgccaccacactccagcctgggcgatagagtgagactttgtctcagaaaaaagatatgcaaaacgtgtagcgtagagactggaaaggcagatgcattatttctgaagctctctagatcccaaccaaaaaacacccagacaactagataggaaaaaaaatgtttccatggaaaacatttacaaacgaaacaaggtatggttgtctgcagttcaggcccacctgcatgactttggcatctgtgcaggaaaaaacagtggcagaaccccaaaataatcaacaggtatccccagaaagtgtactaggtgctttgggggaacagcagctgaaactgggaggcgttttgctcactccaggggccagagtgtgcacagagccagtgggagggaggaaggggctggcgcaggcttgctcttgggagcttttgaaacttagccaccacagctctccctaaggtcagagtctcacacgagggagagactgctggaaatggaacagaaattgtgtagaaaagagaccatagagactgtgggaagagaaggtccgggtaaatgtggaagaatgtcaggaggtgagctctgcaaagtcaggaagataactgtgaatgatactctttctcaaattccaggaaaactagtttcctttaaggatgatcaacccaaaagcatcaaggtcaaattccatggatgagtttctataacaaagtaccatagactgggtggcttaaaataatagaaatgtattacttcatggttctggaggccagaagtccaaaatcaaggtgtcagcagggctgcacttcctctgaaacctctaggggaatgcctcttctgtaggggagtgctctttctgtaggggagtgctccttctgtaggggagtgctccttctgtaggggagtgctccttctgtaggggaatgcctcttctgtaggggagtgctccttctgtaggggaatgcctcttctgtaggggaatgctccttctgtagggcatgctccttctgtaggagaatgctcctgtaggggaatgctccttctgtaagggaatgctcctcctgtaagggaatgcctcttctgtgggagaatgctccttctgtaggggaatgcctcttctgtaggggaatgctccttctgtaggggagtgctccttctgtaggagaatgctcctgtaggggacttctgtaggggagtgctccttctgtaagggaatgctcctcctgtaagggaatgcctcttctgtaggggaatgctcctcctgtaagggaatgcctcttctgtgggagaatgctccttctgtaggagcatgacttgtctcagcccctggtggtttgttggtgatcattggtgttccttggctcgcagctacatcgctgcaatctctgcctttgtcatcacatgatcttgtgtgtctttgtcgtcacatagccctcttcttataaggataacggtcatcttggatcagggcccaccctactccagtgtgacctcatcttaactgattacatctgcaatgaccgtagtttccagtgacgtcacattctgaggtactggggatggaactttgacatctttcttggaaggatgtaatgcaaaccatgacacccatagaaagtgttaggggctgaattgtgtccccccccaaattcatatgttgaattcctaatccctaatacctctaaagtccctatctccaaatgcagtcacattcaacgaggtaattaaggtaaaagtgagatcatatgaatgggcccnnnnnnnnnnnnnnnnnnnnnnnnnnnnnnnnnnnnnnnnnnnnnnnnnnnnnnnnnnnnnnnnnnnnnnnnnnnnnnnnnnnnnnnnnnnnnnnnnnnnnnnnnnnnnnnnnnnnnnnnnnnnnnnnnnnnnnnnnnnnnnnnnnnnnnnnnnnnnnnnnnnnnnnnnnnnnnnnnnnnnnnnnnnnnnnnnnnnnnnnnnnnnnnnnnnnnnnnnnnnnnnnnnnnnnnnnnnnnnnnnnnnnnnnnnnnnnnnnnnnnnnnnnnnnnnnnnnnnnnnnnnnnnnnnnnnnnnnnnnnnnnnnnnnnnnnnnnnnnnnnnnnnnnnnnnnnnnnnnnnnnnnnnnnnnnnnnnnnnnnnnnnnnnnnnnnnnnnnnnnnnnnnnnnnnnnnnnnnnnnnnnnnnnnnnnnnnnnnnnnnnnnnnnnnnnnnnnnnnnnnnnnnnnnnnnnnnnnnnnnnnnnnnnnnnnnnnnnnnnnnnnnnnnnnnnnnnnnnnnnnnnnnnnnnnnnnnnnnnnnnnnnnnnnnnnnnnnnnnnnnnnnnnnnnnnnnnnnnnnnnnnnnnnnnnnnnnnnnnnnnnnnnnnnnnnnnnnnnnnnnnnnnnnnnnnnnnnnnnnnnnnnnnnnnnnnnnnnnnnnnnnnnnnnnnnnnnnnnnnnnnnnnnnnnnnnnnnnnnnnnnnnnnnnnnnnnnnnnnnnnnnnnnnnnnnnnnnnnnnnnnnnnnnnnnnnnnnnnnnnnnnnnnnnnnnnnnnnnnnnnnnnnnnnnnnnnnnnnnnnnnnnnnnnnnnnnnnnnnnnnnnnnnnnnnnnnnnnnnnnnnnnnnnnnnnnnnnnnnnnnnnnnnnnnnnnnnnnnnnnnnnnnnnnnnnnnnnnnnnnnnnnnnnnnnnnnnnnnnnnnnnnnnnnnnnnnnnnnnnnnnnnnnnnnnnnnnnnnnnnnnnnnnnnnnnnnnnnnnnnnnnnnnnnnnnnnnnnnnnnnnnnnnnnnnnnnnnnnnnnnnnnnnnnnnnnnnnnnnnnnnnnnnnnnnnnnnnnnnnnnnnnnnnnnnnnnnnnnnnnnnnnnnnnnnnnnnnnnnnnnnnnnnnnnnnnnnnnnnnnnnnnnnnnnnnnnnnnnnnnnnnnnnnnnnnnnnnnnnnntgtaagggaatgctcctcctgtaagggaatgcctcttctgtgggagaatgctccttctgtaggagcatgacttgtctcagcccctggtggtttgttggtgatcattggtgttccttggctcgcagctacatcgctgcaatctctgcctttgtcatcacatgatcttgtgtgtctttgtcgtcacatagccctcttcttataaggataacggtcatcttggatcagggcccaccctactccagtgtgacctcatcttaactgattacatctgcaatgaccgtagtttccagtgacgtcacattctgaggtactggggatggaactttgacatctttcttggaaggatgtaatgcaaaccatgacacccatagaaagtgttaggggctgaattgtgtccccccccaaattcatatgttgaattcctaatccctaatacctctaaagtccccatctccaaatgcagtcacattcaacgaggtaattaaggtaaaagtgagatcatatgaatgggccctaatccaatacagcaggagttcttataagaagggattagggaccaggtgtggtggctcacgcctgtaatcccagcactttgggaggccaaggtgggcagatcacaaggtcaagagttcgagaccagcctggtccacatggtgaaaccacacctctactaagaatacaaaaattagccgggtgtggtggcatgtgcctgtaatctcagcgacttgggaggctgaggcaggagaatcgcttgaacccaggaggcggaggttgcagtgagccgagatcatgccactgtactccagcctgggtgacagggcaagactctgtctcaaaaaagaagaagaagaagaagaagaagaagaagaagaagaagagattaggaaacagacatgcacagagggaagaccatgtgaggaggacacagggagaagtcagacttctacaagccaaagagagaggcctcagaaagaaccaaacctgccaacaccttgatcttggactttcagccttcagaaccatgagacaatccatttctcttggttaggccacccagtctgttgtatagcaaacaaatgcacagctattataagcaaaaaagagaataagagacagaatgatatccctctgggtaatgaaagcacaccagaaagacgtgcccagactaaatgaaaattctaatattctatcttgaaagaaaccaaaagtgttaagaaaataaacaaaacatagaagaaaaatggggccgggtgccctgtaatcccagcattttgggaggctgaggcaggtggatcacctgaggtcaggagttcgagaccaccctggccaacatggtgaaaccccatctctactaaaaatacaaaaattagccaggcatggtggcaggtgcctgtaatcccagctactcaggaggctgaggcaggagaatcacttgaaccagggaggcaaaggttgcagtgagccaagattgtgccattgccctctggcctgggtgacagagcgagactctgtctcaaaaaaaaaaaaaaaaaaaagaaaagaaaagaaaagaaaaaaaaagaaaaagaaaaaaagaaagaaagaaaggaaaatagaaaaatcgagtcagaattagaagaaaactgagaaatgaagtaatagaccaaagaaacaaaaagttaaaaatttcagatgtaaatactaaactagatggaacacaaaagtgaataaacagataaatagaagttgaaaagaacaacaagttttaaaaatcaagaaagaaataacaagagatgaaaggcttgaagaaaaagtgacaaatattcaaaatctgtaagaagatctgacatttagataataggactccctgcagaagaagccgaatacatgggggaaagtactatacatgatctcaagaaaactttccataaattaaaaaagagatttgaaattccacattgaaataacacatagcgtacctgagaatatcaacaagaacaaccaacaccaagacacataacacattcttgtgaaattattgtactttaaagaaaaggaggaaggccgggtgtggtggctcatacctgtaatcacagcactttaggggccaaggtggcagatcacaaggtcaggatttcaagaccagcttgaccaacatggtgaaaccccgtatctactaaaaatataaaaaattagcatggtggtgcacgtctgtaatctcagctgctcaggaggctgaggcaggagaatcgcttaaacttgggaggcggaggttgcagggagccgagatcatgccactgcattccagcctgggaaacaagagtctcaaaaaaaaaaaaaaaaaaaagaaagaaagaaaaggagggaaaaacaaactatgaacatttaaacaaaaacagtaagtgatttataaaggaaaaaaaatgttctcatcagactctttgacagcaacactttatgctaaaagaaaataaataacatattaaggactctcaagaaaagttaagcccagaattttatacctagcaaaactgactttcatgtgcaaaaagcataaactattatgaccatgcaagcattaaacattcagttacttctaaaactacaactaaatgagtgttataaggaaaagagtatagtatgaattactggataggtcagacaatgtagacatagcacatttatttttaaactctgagccgaatagggagagcatatcaaaaattattttcaataattatgttagtcatggtaactttagaattgttatcctgaggctactgtgtaggtaatgtgggataatgatgggatactgcatgtccttgaggaccaggattctgatgtggaagaaagaatatgcctttgtaatacagaagagattaattaaaaaaccatatggtccttcttttgaattggatatcagtatgaactcttggtgtatattagtttttaaatgttcactgaagaggcctagaaacaatgaccaaccccctagcactgagcctccctagtatccagactggtcttgataagccatttctcactaaaaaacaaaaacaggccaggcgcggtggctcacacctataatcccagcactatgggaggccaaggcaggcagatcacaatgtcaggagttcgagactagcctgaccaacatgatgaaaccccatctctactaaaaatacaaaaattagctggtcgtggtggtgcccgcctgtaatcccagctactcaggaggctgaggcaggagaatcacttgaacccgggaggtggaggttgcagtgagccgatatcgcaccacagcactccagcctgggtgacagagcgagactcatctcaaaaaatatataaaaataaaaataaatgaaaaacaaaaacagaaatacaaatccaagacttcttggagaaatggttgattccaggtcttgggcagtaaaagtgtaaaatgaggctggatcatctcgtcacatcagatagcaagaaagctgtgaaagacgacaagggctgggccaaaaggacccaggagccaacttcattttccctctggcaagagatgggaaaatttgagtttcaacaaaggataaaaattgcagaggatcaaacctcatcggagtggcttccatcatgggttcatactgatttttttttccccaaaaatcctttggagaatgatagcacactagttagcttattatcctgaaaattagaaaattcaaggaaacaaccaagtattgatctgctatttcctggtaattaaatcacaagagcacatgaagggaagcatctgtttacaggagtagtccagctaataaatggaagtgaagtggtagaaccagactatcggcattttgcaatccttgatgaatcagtgggcgtaggccttgagcatcagtagatgctgtcctcacagagacagccagtcactgtgtggctctcactgaagacacactaccacctaccatcttgccaaagggaccgggcctgcatgggatcaggcctctggatctggctgccaatgtccaagaaatccagtggacagaggaccatgctgaactgcaccgtgaggatgcaatcagcaaagtccagcctgtaggaaacacaacagctcaaattcttcaggttctttaatagataagttgtatggaaaataaaggaggccgggcacgttggctcacgcctgtaatcccaacactttgggaggccaaggtgggtgggtcacctgaggtcaggagttcaagaccagcccgaccaacatggtgaagccccatctctactaaatacaaaaaattagccaggcatgatggtgcatgcctgtaatcccagctacttgggaggctgaggcaggagaattgcttgaacccaggaggcggaggttgcagtgagctgagattgcgccattgtactccagcctgggtgacgagcaaaactccgtctcaaataaataaataaataaataaatagaaaagaaaataaaggaacagagaagaaacctgtagcttaaaatggacttaaaaggcagagcaaaaacttgttgatggacaagtctgaatgattgtgtctagagacgcacactgatgtgagaaaactatgaagaaacccaagtaggccgggctcggtggctcaggcctgtaatcccagcactttgggaggctgaggtgggcggatcacaaggtcagaagttcaagaccagcctgaccaacatggtaaaaccctgtctctactaaaaaaaaatacaaaaaaaattagccgggcatggtggcatgcgcctgtaatcccagctactcaggaggctgaggcaggagaatcgcttgaacctgggaggcggaggttgcagtgagctgagactgtgccactgtactccagtctgggtgacagagcgagactctgtctcaaaaaaaaaaaaaaaaaaaaacccaagtagagcactgccgtgggactcaggctaggggtcactgttgggttgcaggaggggttgagttctgtctggcagttgcggggcgtttggtggctggccaagttctctttcttgacctgggtggtgattataaaggcgtttgccttgtaataactcgttaaactatactttcattttgtgtaattttgtatccgtgttttattttatgatcaagaggttgtaaaaatctgtctagcacagtacctggaacccagacctctgagagactgtagcctcttctcctgcctccccgtcacctggtgatgtggaattgactgccctgtgctgggcaccgagcttggcgctttctatctgctccttcgtttattaccctgctgcccagcctcactgtgggctctgagaaggcgggaccatgtgtcccttgttcactttgctgtccctagcagccggcgcctggcactcaaaacatatttgttgggcaagtgaacctgtgactctattttgccattgtagctattgatgctcaattcgtgcagttgacaaatgtccaagctgtgcttatccgccagggcacatggaagctggagggtgttgctggcatttaggtcccggtccagtttgcaggaagggccatgaagcctccccacagagcagccaggctgcagagaccactgtcgttctctgatggagctgtctctgggacagatgcccctgccctggccacctgctcctcctccctagacctcggcccctgtgggagctgctgtcccagcttccccgtcagcctcgtgtgctgtggttcccctcaggctccagcaggagaagacagacacggtccgctgcatcaagtcctgccgccccaacgatgtcacatgcgtgttcgaccccgtgcacaccatctcccacaccgtcatctcgctgcctaccttccgcgagttcacccgccctgaaggtgagtgggatgggtgtgggggtcccagggccccctagggcctccctcggcttcagctgagggcttggcctacaggagttgttccttgtaagatgtggcccaggctttgaaatgcagaactttcttttttttttttttttttttttgagacggagtctcgctctgtcgcccgggctggagtgcagtggtgccatctcggctcactgcaagctccacctcccgggttcacgccattctcctgcctcagccttccgagtagctgggactacaggcgcccgccaccacgcctggctaatctttttgtatttttagtaaagacggggtttcaccgtgttcgccaggatggtctcaatctcctgacctcatgatccacccgcctcagcctcccaaagtgctgggattacaggcgtgagccaccgcgcctggcaacttgacatgcagaactttctttgtgtctgtgtcccccccacacccacctggcacagcagcatttggcccattctcagctttccgttcaggtggtcttttcttatgggtaacggttgttctgcagagagccattaagcgctgattctgtgaccagcactggagaatcagggagggcctccgggaggaagtgatggccaggctgggtcctgagtggtgaggtatttgagtgaaagggggagaaggggaggagggtgcccagtggagcaggacatggccagaagggtctggaggtatgggggggcggtgtgggcgtttgagaaactgagccgaggttttctgctggagcgctagaggcttggcaagaggtgggctggaaggataaacaggaggctaaaactggagttgggccttcaacccccaggctttgggggaaccatcggaaggttgcagtggaggaggtttgcatatagaaacatcatcctgttgatccagggccaggtgaactggaggggccagacggggagcaggaagctcaggtgtaacccagtcagtgctcccacaccccagcctggctctctaggaagctcctggcatgcagtgtagtcatgttgtgtaacctgccatcactgcaccgtttctctggagcagggcctgggctgcgtgctcccaagcctggcagagggctatggatggagcattgtcctgttcacctcgcttcctggctgtgctgcccgtgtgcccggtccccaaccacccccgccctctagggagtccctatccctggcctgcggagaagcatgccatgatgagttcattcagcagccgtggacggagcccctctgtgtcaggctctagggacatggtgataagaaggggtcctcccaccctctcaggggaggcatgcaacggagccagccgcgaggacaccagtgtttacaccatgacacaaccatgcgggggggtggggggaggagaggctccctcagcacgtggttgcccaaggagccgtccccagtcccagtccccctaggtttgctcctcccgaaaaggaataacgctgaatcgtcacagggtggcacagacttgggtcagagaaaataactaactggtatttgccttttgcaaaatgatggggtttcaccaaaccacatacaaatccttcccaaatccccagtggctggttttgtggcctctccggccagccccgatctgagtgttggttatcgcagggagccgagtgccgttgggacacctgttagcatcttgggcccaggaaatccacaccctgaccttaagtgctgaaaggacctttagtgggtctccgccggcttccttcctcaccttacaggtgaggaaactgaggcccacagagaggactcccccaagacagcccagagctggggctgccctgcttcactgtctgatctgggagatggacacacaccccccagagaacccaggccaccgctcagggtggcccccctgacctgtggcactatagatgggagaggagcccacccctctggcctttctgctgtctccctctgtcccctcactcgctttcctcctctggtccccaccttcatgaatatgcacagtgactgatgacttctcaccagcccttcctctgattagctctgtgtccccaaggaagatccaaaatctctcctgacttcagtttcccctgctataaaacagggatgggctatgatataggaaggtccagacccctccaccctccccacacaggggatctctggcttcattgatgttgtctcatgaaagggccctgggttaggtcttcattccccaagggtgagttcctggggacgaggctgggactggggctggggccaggctgtgctgagcccttctccattctgtgcctctgcagagatcatcttcctccgggccatcacgccaccgcatcctgccagccaggctaacatcatcttcgacatcacggaagggaacctgcgggactcttttgacatcatcaagcgttacatggacggcatgaccgtgggtgagtggctgggaatatcagctctatccaggcacccctccccctccaccccgaaaccctctctggcccagcccaactcccatctgagtcccctccccaaattcaagcccacccaaccttcagggcccagcgccgaggccaccacagctcccaatcggtctcggccggaggaacagccagagtgggggatcctgcctgggatctgaccctagctgtgccacccactctctgggtgacccctctgggtctcggtctccctgcctataacatgggtgggttccagagagcgctgcgcctcacaaccatgaatttcaaatgataccacccaagtaaagtgcttgtcctgagggctggcacagtcccgcggtcggtgggagctaaggggattgttattcttggggtgcaatgggagggatagcaaagtaggaatcagagggcctgagctctggtctctcagccttggaactagctggattcgccatgtggccttgagcagtagtcgtcccctccctacgcatcagttggtaagaggaccaaggccactctgtgtgcacagcccatctgaatggggagctcactgctctttctccctggagatccggtgtttggggagcgtgaagggaggctggggcatgaggggactgtggaagtcctgttggtgggtgcaggctggggaagatgtttacaggcgggggcagggccctccctggctaggaacgggctttaatgacaacctactcgtgtgaaaaaatatccaggcccactccattccgcacgcttgtttctgtcattcacagcccctctcctgaactgtcacattttaaaagatttacagtcatgggaaatgaaaacggtggcatctgccattttggactcggatttatactctgaacactttcaaagcagctgagcaacggacggacagtccctgacctcccctgggcctcagtttccccattgtgaactgggaggagtgggcttcctagtcccttaggcgctggagtccgggaggtcctaaccagaacccacgagcgtgcagtgcgcacagagcagagcgttttggagcctggcctccaggtggcgctgttggaccttggacgctcagtctttgcgcctcaaacccgacggttgttaaaactggcagctggagaaagggaatcgttattcccgtcttgccaaagagccatttatagcacctttacaagcttttaaatgggtttgcatgttgtaaacatgactgagtcactggggggctccccaccccagcctcctcctgcgctagctggcagcaggaataattagttaattacaattaatggtgcattagccctcgcgtgattccaaggggaaggcgcatggtttggttgtcggcagttgtgaaacttgctgcttgcccttgagtcactccccactctgggcctcagtttcccccattgtgaaatgagagtttagatgaagacagccttgagggtccttcaggcccctgtgcaggagggcaggcagggagggggttgggtcagggctttgtcctgtcccactgggtgggtggggtatgcaccctgacactggcccacagccgccccccgccccaaaggggccagccctgtgcttgatgctgggcctgcagttgtggctgggacatggccctcaggtgatttctagatcttggaacatgggagtttggaatcctaggaccttctagttcactcactcattctttccgtttctgaacccttcttgagcctctacctgtgcctgaccctgggctaagccttgcagatacagagatggataaatgccacatagcccctgaggactttgcatctcagcagcagggagaagccaccccgtatcagatcatcaaaatatgatgccgaaataggcatgcacagagacaggccttgatggcctgtggaggctctcttaggggaagtctcctggcaggttttacgtctttagttcccacctacatccttcctggggtgacccaagccaagaggttgggcagctgctgggcctagaaccagcacccaccagcgcctttctctggctgcatctgctccagacagaaccaacctgggagtgtctgtttctcagcttcccatccactggggcagaaaatcctggcatgtcagagcctggaggctcctagagaccatcccttccttcttccgtaggaggggaaactgaggcccggaagggcgagggggcttgccagtcttcttacagtgaatcagggacacagtgggcaatggaaaggagtcccagggtatgagagatgatcacaggtgccgtcccggcagcgggcttctgggaacggaatgtggatgaggccacaaggacccagcggcttcccccggcacagttggtcacgggtgccctggtctttggaattctgggctggggctgcgtgggggagggccccagcctggcccttggaattgtcgtgcctgtagccctgtgtgctggggaggcccctgcctcttccacgcctcggtctgtgtgcaggatgccccacctggctgggctcctggagttgacctggtgcccatgtcatctcaggtggaagactgagaccagggaggcaagccctgcgtgttgggacctaggctgcattgctggctggctcctgtctctgtccccactgcgctgatcttatttctctgtctgagatctcctccttgggcttccatatccctacttccttctccctcctcttctgcccagaataacttccatacatcctgggagcttcctggtccctaggggcagccatcccggcacacggctcctggcctgtccacctggtaatagatggttccaccgttggactcgagcccagcctgaagcagccctgaaaacgtggggttgaacccttgccggctccttaccgttgctgggcaccttcacccccgcattccccagtcctcacagacactgccagcgacgggtcatgattgtctcccttgggcaaaggagggagctgagttaaatgaccgcctgagactgtgcaactgaaaaactgcagggcctgggatgttttccgacttgtttttagcagtgcagttctgatttcaagcagtgacttaggcagaaacccttcatggtggtggagaggaagaaagcggcttccagggctgctgctcctggtggggagcgtgggaggctcttgagcctcctgggcagccccgtgcagctctgtgctgcctgcagcacacggcagggaacgccgcctactcacggtgcttgctgaacacctgtctgctctaggccatgccctgtgtggacactgggcaccggatcaggagggcttcctggaggaggtgaggcccgagctgagtgtccttgcatgtgagggagtgacacttagtgagcacctgtgatgaccaggagccagggtttcatcatcgccaggaccctgtgacacggtgggattatctcctctaacaaaggagagagcgagagccagagagggcaagagatttgcccgaggccactcagagctggggccagagcgggcctggagcccggtcttccccagacaccacacccgcccagagccggagcccagggttgactgctgctgtggtgggctaagttgctgtgagtttggatgtcccagaaaaacaatcagcgcacaggccccggggctcgccgtgttcagtcctcccagagtaacagaagaagagggagaaatgccccgagtccactaagaacctgcaagggccgggtcgtcctctaatgtagccttgaaagacccgttcttagcggggatcgaggagcccgcagcagggcccgcgccgtcgtctttgtaaagcccccttgcattcctctttaaccggctgtcaaagaaaaatgaagaatgcgttttcgccctgtgcaaaaatgctccattaatgcccgagggattctcaggccactacaaagctttccttatctggctctggattcattctcagctctgcagcctgtaatccggggtgctctgggaagagatctttcaggtagtatatcctgagtgatgactaatgggggagccctggctgcagcaggggcgggctgtgtatcatcagcgtgcggaagagagagacagaaaggcaactcgaggccacccgggctccccgggcccctgggctatggctgctgtctgagcctcagacttcccctccagcctccagatcaccacttccttttaactctcaggccagccacatctgtgtctgtctggctccctccactcagcctcaagacccagcatgtgtgtgaccacttccaagaagcctcccctgactgctccagggtcatggctgtgtgataggagggcctggcctgcaaaaacgccctccctatttctccagggagggaaatctgtgtgctatgaggcttggttgtggccacatttctgttaaaaccctgccaatgccaacaggagctacagagcctgcaggtgaagtaattctttggcctacggacgaattttgcatgtggacctcctgacccttgggcctcccgggttgcagggagctacggagttgtctttgtagttttttgcaggccagcccctcctgtcgcacgggcatgaccatggggcagtcaggggaggcttcctggaagaggtcacacacattctgggtcttgaggctgaggggtgagccagacaagtgggacacccaaactcacagccacgtctgtggctggcccatgaacagcgcgatgagaggcagggagccaggaagggagggcacagcctgcggtttggggctgctggagcatccagggtgcagggagggtcgaggggaggccgaaaggggctgcagggccaggccttggtggatgctgtcctggggaccacgggagccacgggaggtctgtgctgcccatggagcttccagatcccgctgctttatttaacccactgggcctcctgcagcttgaggttgcggttgaggttgtacccactcagcaggtaagaagactgaggccggaagagccaagtccccaggatctcccagccaggaagtgttcgaggatagggcttagacctgaactgcccagatccgggactccccatccccatggcctatgttaagccctgattattttttctggtctatactagctggtatctacactggctggcatctgtcagccgtggttgagtctgagtcccagccgtagaggataaatagtgaagcacctcctttcacacagtcacagtgctcccggccatgggatcttgggtcctgggccagcccctgatgaggaaagacctccctgtatgtccaggcagtcaaaagatgaagttcagatgtcaccatgctgcggaatggcgaggtcctggagggtctctctccggctctttacctgccgagggcccactcatccttggtcacacaggcgacccatcatgctgctccctgggacccccagacctgcctcctttccaggacccctcccagcctcaatgattccccagtgacagccacagccgcacctggtgcagatagatgctggggctggctgcaatttagggaggatctttctaggctggggcaggagcttcacggctgggaatgggctttaatgacaacctacgcatcttagaagacattcagacccactccactctgcacagttgtttctgggcaagccctctgatatgatttagtgcacgtgtggctgggtgtggagtgtgtgcgtgtgtgtgggtgcgtgtgagtggtgagtgcgtatgcacagggtttgatctctgagatgttttatactctctggcttggagaagggacagtcctgtagtatcaagaccagaccttgtgtccccagcccaaggctgccctgggcctagggacagtatttggagacttcgctggcagttttgcgttggaatcacctggtgcctccctgtacgtccacccaccctgtgcccagatccccttcgcaagcaccatatgctgttagatcctcgagcagccttgtgggacagccaccctggggctggtatcaccatttatgtaagaaaaaaaaggaagtgctggcccagggtcccacagccagcaagttggagctgcactgcccaagcaggtcctttagtcagctctctgttgtcccccaagcccctcagccccccaggcagctctaagggctcagctgctgcaggattccttagagaagctgaagggtttgggtcctcagctcctggccggggcaagtctggccaagcagcatggcagcgatgaagtccacatgatcgaagggtggatgcttaccttagacagctgctcaccttagacatggtcacctatattacatttaggaaggaaacgccctaattggagactctgcatctcattaatggaatcagatgaaacgatgtatgtgaaagctcccagcagtgcctggcacacagtgggtgcacaggatgtaaatactgatggaaacctaaatgttctgtaaatatcagttcttcctaatttcgccttgccgtctctcttgagagtggctataccttctaggcctgatcaggaaggaagctgggttttggtgtgccagtcaggtgagacgcagagaagacagcacaatcaacacaggaagtaacagaagcagctagttactcacaggtcctagagaggtggggagcaccccttgcagggccaatgggaaggggaagcgcctgcagcatgagagagagagagaatgagagagagagacagagagagacctgtgggaccaaagcctttactggggtccagggtgttatccaggcaggtttcccgtgaggaattctaactggggggcttggagcaggcaggagttccctgaggtcatgcggtggcggatgggggtcacttctgcataggcctgcactatcgatgtaggtgtgagggtctttgggttgtatccagctgtcccataaggcaggggcccccaggaggtggtggtataaggcagtcctctgggtcaaccgccttaaggaactgggaggaggtggagaactggaacccgcagcaagggtgactgagccctgctctggtgtgggagttaaacgcacattcagaatgcgtgccgaggcaacataggatgagaagccggcacaacacccaggcttttccatgaaagtgaacttgacagccgctttcccacattgtctgtgctgagtcgtgggagcctctgagttttgccagtgtgtcaacgcgctcctgcagcactctcacccccacttaaagggaactaccacagtttatgttttgaaatcgcattttaaattccatctgtgggtgtataaggattattacccaatttcaagtttaccgtttgaaaaatagcaatggcgtgagtggccccttttaggcaaagtgtgattgggtctgtgtggccgcggcaaactgctctgggcttgcggctttgttctctgtttccagctgtgtgactttaggcaaatttcataacctgtctgagcctcagctttcttctcagtaaaattgccataataatatttgccctgcagggtaatagggactgaggtgtgtgcctgttttaacataagagtggtctagtctggaggataaatgagccgctgggaggaagaagtttggaaatggagggctggtgggagcccggagccttcttaggggacaacaggccagatcaaggatgatgggacagggccaggaccgtccagcccaaagtggctccaactgcccaggacctacttaataggcagatctcgcggcctgggctggtgaggccggcctggccggaagcaagtcagcaagcaggcctctcaagtcctatcatccttgaattatcttattcattcaacaagaacatcctggggtacttttctatgccaggccctgcactgggtactgcagaacaaatctacatccaagctacgcatcctgcttttaagaagctccccaccagcatccatagcatcctgccagagttcccacagctgaaagtgcttgtggtttaggggttggtgtcatcccagttcatgtctgagagagagagagaagtggcgtgtggcagggctgctatgtacagttggatgtgttgtgcactgcaaaatctaggcagcaccatccaccggtgagtctatttgcagtacacaacctgctcaactgtatgcagcagccccggtacaagggcttgtgaatggagatatctacctagctgtacctctccccctggccaggcaaggcctcagtcaaggcttgagaccgtccattgtcccagccagcagggcccagatcacctcgttaaaattattacctcttaaggggttaaatgtgcgccgctgaccgcgtcctgcagcccatgtggagagtttggcccgggatcagtacacattacaaatgagattcagaaattccacctaaaaacaacagcgcggccgtccctgcccaacgatgagtgattgccctgtcctggctttcacggcaaatcccagggatgacgcgctttctcttttctgggagacacagccctgtcaccccgggggccacaccctggctggcagccaagttctttcccagggtgctgggcccggcctcctctgggctgggatcagctgcggcctgactccatcttgagctgggggtgtcaccgagggttccaggaggtggagggcatggggacgagggtgtctcagagactgggagatggaaggagaacacacaccttttctgctccctatgtcgtgaccccatggggcagagatgggctctgaggcatcagagcctgtgccctgtgtgacggcgcgtagccccccgaaacagctgctgttatccctccttgaggttatcagcccccaattccccagataccaaaactctcagaagtcacccccgtcacaaagctggtgaccctccctgcagcagctcctgggctcaggccagacccctcagaaggcttggtagcattaatggggtacagtctctgcttttgagcctacttcagtgagacacacagggggccccagggaccagtcccggaaacctccctgctcagtgggtggcccctggacagcctgggctggacctgcagtaacgtggacagcattcattcggagctcaaggcctcagccccaggagacgccctgtccatgtgagtgccgcactgcacacccgagattggttttccagcccaggacctggctaggaagggtcggcggggtacagcccgctcagcaccccctgccgtggccgcctctgcaggaggagacagcatggtggggagaggggactgtcttgccctgctgaacccccaggggtcggctacacccctctctacaggcctttttggtgtagcgcaggtgagacaatgcagccagagaggttgggagattacacagctccacatctgcggtgtcaccgtggacgggaccgtcatggtcccagcgggagggtggaaggaagccaaacttgagacgtctgccttgcacaaaggcagtggtgctcgtcaaggtttgggctggaagacttagcacctggcgggcatctgaaaatttccatctcccgtgcctgcttggtccccacggacacatgcctgagccatcagggactgcaaatcacaggggtgggaagacagggacgcacactgagcaggtgaaaggtggtggggggtaagcaggtgtttcggaaggagtagaggagggcccggaatggggccacgtaggaaagggtcacatccattcaccctggagtcagcccgagggcccaggcagggtggggtcctagtgatgcctgtcggtgggtgacatcaggccatccacagcaccgggagccagcagaaagggctgggccaggccatgtggacagggtctacggacagtacagggccagaggtccctattctgggaccttgacatgctgccgttctcgtgagcttctgggggactcctgcgaggcatgtgggctgcttctcagacctgcgggtaccccacctcccagatgttgtcaatgggatgtgaggttcacgagcacgtcacggagcctctcccctcgtcatgtacgtgcgcatcatggcaaaatgtgcctggccactggttcctgacgctggaaggcacgaacccactccccacacccacagccggcgttgctgtgactgcagtgtctgtgttctaagccccacttttcacatccatccccgctgcccggccagagagacgtcctcagcccagagccccacttttcacatccatccccgctgcccggccagagacacgtcctcagcccagagccccacttttcacatccatccccgctgcccggccagagacacgtcctcagcccagagccccacttttcacatccatccccgctgcccggccagagagacatcctcagcccagagcttcctatctccctcgcctgctcctaccctccagaataaaatgtgtacgaggtagggaatctgtgcttgtctgccagttgtggtcactgctgtatctcttagagtggggcttacccctgggggcccagcgctcagggatgcgtgggctccaggctggagagaagcacccagatctaccaactggccttccggctctgcagagccgcttgcatcttactccttcctcttccctccgctctgcttcagccactccagcccatgcctcagaccccaaatattccatggcctctctcctctcctggactgtagccgtgacattcacttccttctccttttggtgaactcctattcatccctccaagccgatgtcagctgtcacctcctcttggatgccgtccacacgctccacatgcagagtgtgcagctccttcttttgtgctccagtggccccagatgagccccttttgcaactctcctcatactcattctcccaacgagtaatgtgtgtatccctgggggcaggtcctgctctgaggaatgcagcagtgactaaggcagacatgaacgcctctctcatacactttttatcccagagggtaggagtacacgagaaacaagcataatatatacacggtcagatggtagtgagggctgtgcagagcaggggaggggagtgggaggcggggtgcagcatggcggtacagctttaaatctggtggtcagtgacatttgtcaaagactcaggagctgaggaagtgacccacacagagatctggaggaagagggctccaggcagagggaatggcagagtgctggagtggccatgcctggggaactccttctggaaagtctgtcgtgaaccagagcagataaatgcttgtgctggggggaggggtgtcgtgaaaagggaaacaccaggagttgtggcattgggagtttcttcgcttgactttcaattccaccaaacaattcctagacagaagagcctccaggggtttattcgtgcaaggctaccctctgtcaccctgtttgtccttgcttcttatacacacacagaacagatgcacccactggggtcaccccaacccagcccccagcagttgcccataactggccgcaggatcccacacacctgctgacttccagagtcaccaaggggttaaaaggggctgggaacagcctcttagtctccagagcctcccgcaggaatgatttgtgaccctcttaggctgctggtctgcaccttctgaaaagcctttaatatcaccgggcacattcataaattattcttttttaaaaatgaaatgttttagccaaacagcagtagaggcatgttgtgcaaaattagcaaaaaaaaaaaaaaaggaatgacgatgatatgaatcttttggcggcctctcctaaccgtctttaaatctgcgaaaggatctcagtgcccgccattacctggccagcaccgggaggatgtcaggtgcttccaggcggactctgctaggaacattccatctgtggccaaggctatcacagtcctcaaattaacagcaaaccccgcgtggcccttgtggtgtgccaggcactcttctgggcatatatatgtattttttatatataaaaatattttttatatatataaaaaatatataaaaatatttttatatatataaaaaatatgtaaaaatatattttttatatataacttgctcctcatagcaaccctgtagatcattattcccattttccagatgaggaaactgaggcacacaggagcttccaggctcaggtgacatgaattaagaatgcacacatcatgctgggactctgtggggttcctgctgtcatgactttccccagcgaccttggggagggcagagttctactctttgaggcttgacccggtcctgaaatctcagttgtcacttctgcatcctgacaacatggagcacggtccatagcgtaggtgtatcgtaaatgttcagtccatggcagcgcagacagtcatctgcagattcgcgagcctctgggatgatggcctggaaaagggacattgaggacgtggccttgctccagcctgggggggctctgtgccatggccctgcagcagggggcccctttctgccctgaattggctcattcatggcgcctctcaggagtaaaggagaagaaagtgatggttctccaccaacttcacctgtcccctcctgctgaactccagcagcggctcccatggctccaggagagagaaggggcatgactggcctgccctctcatcagcctctcccctagccctccctcctttactctcatctgctcaggaaaactgagagcaccaagctgcctcatgtctccaccctccccgcagagcaccctccccgcagagcaccctcccatcgcccttttcttgttgggcacctcgttcttcaaagtcagttcaaggttaacccgttggggaagcttccatgacaccagttcccggtttggggtgtgtatttctccgaagctctcccaaaggagatttgcttacctttatcagcctctgctgccccaatcccctgtgcctgctctcccagtggctgagagccccatgaagagccagaccagggccaggtgatgttggtaaccccagcacccagcactgcagccacccacagcaagtgctctgtgcttgtcagatagagaagagagggctctgctctgacctgcaggcctggggctcaggaccccctctctgcactcaagggctgcccgccaggccagcctctcttcccccccatccctccagaccttcattgcatctgtagaaagaggcagagtagccttcactccggaaggcagagggcaggacttggcccctctggtgtgcccacgtctttgagtgaagttggcaagacttgaactcgtcctgcccttcgtggccccctcaccttgggggattgcaaggggttcagtgtggctggggcagtgtgctgagagctgggctggacggggccgtgggcctcagcaagatgcgtctcacctgctgtgagcccgggtgggggtagggtgagaagagccccctgcagagccacagtgggcccccacggttggatttacctcctggctctgagcacagtgggaagaggcatgggaggggtgaaaaggaaggtggtacacgtgttcaggtagatgcgacgaggccggaactgaggccaggtggggttgtggggagagaagggaggagagtctggagacctttaggaatagaatccattggcctcagtgatggtttaacctgagggatgggagtaaggggcctatcgagggcgactccaagttcctggcttgggggtacctgcctggagagtgaggggtaggggaggaagggaagtgggtttaagggaggagggtaggtcagtgtttggcgtgcttggatttgaattgtccatctgggaggggcgtctggagaaattggagtggactccgagtttgggtcgggggcccaggaggaccccacccagcaggtaggtgggtggaggctgaggtcggctcaggagacacacggagggaggggacatgatttcttatccctctagtctcagtcacaagttcacttctcctaaaaggaggtgcctcagacagcagatccttccagaactctcccagaccttgtcttcctttggcaaggccacagagcttggtggaaggggcagtggcccagggtctgggctccagttctggtttactgcttgctggccgtgtgattgtcagcaactcacgtaaccacacagagccaaattttctccccggtgagcccccactgcctgcgtttgcgatgagaggagagacagtcgatgtgagtgagctctgtgatgacgaagcactgcagaaatgttagttcccacgccacaggtgaaggctgaagggctttagtccaaagctgacatttcccttcatatttttccccaaggggaaaggtgcaccctgaaacgaagagctgtctctttcgttcagctaccttcagctgtcccctccaaactgtctgatttagctcacgggagacctgcggaaggagcacatttataaccatcaagaaatacggatgatgagttttgctgagacatgttgactgacacttagtattttaaatatgcagcccagacacctgtcccccttgcttcccggcttttatggcgtttctcagccaagcagagaagaccaggtttcgggagctcagtcccttcaactgcaccaccagcttctgatgcgattctctctaattgctttctgctgtttttgccgtgtgtttatgactcagctaagggcagtacagtcgggaagtgtcctgcgcgccattttgcagacaggagggaggaagtgtcctgcgcgccattttgcagacaggaggaaggaagtgtcctgcacgccattttgcagacaggagggaggaagtgtcctgcgcgccattttgcagacaggagggaggaagtgtcctgcgcgccattttgcagacaggagggaggaagtgtcctgcgcgccattttgcagacaggagggaggaagtgtcctgcgcgccattttgcagacaggaggaaggagatgtagtgggatgggaagatctgggctctgaggtcagtccccgctggacggaaacctgcggccctgttagctccgtgatctggaaggtgctactagtagcgcctcatttttctccccaggagaaggagggcgaccgtgtctcatccctaactgcgatgggggctgaatgcggctgtgggcacatagggtctctctgtctccacccatgtctcctgctgtgtggcctctttccagcccatccacactctagttggtggctttgtgagtgctgacaatacttccatgtgcttttttgttttttcttttttgagacagagtctcgctcagtcacccaggctggagtgtggtggcgtgatctcggctcactgcaacctctgcctcccatgttcaggtgattctccctgcctcagcctcccgagtagctgggattataggcgcctgccaccatgcccagctaatttttgtatttttagtagagacagggtttcgacatgttggccaggctggtctcgaactcctgacctcagatgatccacccaccttggcctcccaaagtgctgggatgacaggcgtgagtcaccacgcccggccgcacatattctcaacgtttcctctttgccattggtctgtgctgctcgtcctcgcctgcaggaactgtggagcctcttggggtgaatttactgaggcctggtgatggtttgcttcttcccagttgcctgcggtgcttgtgatgggcaagcctgcttgggtctcctctgagctcctggcctctctgtttcagcaccttgtccacacagccctacacttcccttcctttctgctcatggctggccccacatggtggccacagttaatttccactggtatgagatattgtgcagtctcttgattcatcatctggtttgctaaaatgctctttgacagccctgcacactccattacacgttgtcagctagaatcacaagcctcacgttggaggctgcactttagaagggaagatgacgtgcccaaggtcacacagctggtcgatgcagagccacctaggaactcgaggctgtaactctaggtctctttataaaccagtgtctagagtcagagacatgagactcaggcagagagaccccccccaccccccgccactgactttcatcatttgaaacaatggagagacaatcaagtgcaacatcaaatagcaggagctgaaagatggcttcgagatggggccgagaatgtggaccacagagcccaagaggcagcgaaggtctccccactgcacccgagcacttcgtgttcaggatcctggatccccagcacatcagctgcaacttacagagcagagccaagacatgaaagtgaagcgcccgaggggacctacatttttcaacagggagaaaaaaagtgcttaattatatctttaagaggcacagacacgccaagggataccagcagcgtctgagacctgaagcagaaatgccagggatgaggatttggaagattaacacaattgaactcagcactgtggccttttttttctttctggggcttcggaaaggtaggaggcaaacaccctggcaggtaagacagacaagccaggtgtgatggaaatgcacctctttgtcctgccttttactgctggggtggtccttccaaatgaaactgctctcacccggagccttcagtggctcccctttccttcaggacaaagtgttgtcttcgttcctagattgtgaggcttcagggactgattttccttcttccttctctccttccttcactctcttttcttcttcttctgccttcatcttacgacgtgttcatggcagaaggcctgccatgggcctgccagggcctgggttggggatggtggggcagaaatgagctgacactgtccctgaacaaggaggccgactgtgagcgtcccctgcaatgagcaggtgcagtgttgcagtggaaagagaccaggtgccaggtgacatagggggtccagggaagacttctgtgaagacttctatgaagcattccagctggtcccagtgtctggcacatgagacatggcaaatcagagtctgtaggatcaagtggatggatggaaccaggcccctggtggcagctctcatgtttgcgatgctgcatgtgggcagcgagtgttccttgctacttcttcctccttcccttgcctccctgtgttagagaagttggtggtggttctgaaagaacagtggtgtagaattcgtgatggggaggcagccaggaaatgacccagcttcttggttctctgagactgacgaagtgaggtcctggggcagtccccaccagatgaggcacgtggctcagcctcatctgcctgcctctccccaagattgacaccgttcccagaaccggcctgaaacttcatatttttgggctttgcacttgtccttcctgcttccttggctcatatttattcctcaaaacccaatttaaagcttcctgtttaaagctcctctgtgcagagtagcctctaatggatgggtgggtggattcatgggtgggtagcatctaatggatgggtgggtggatccatgggtgggtgtgtgggtggatggacagatgggttgattggtgggtgaatggatggatggttggatccatgggtaggtgagtggatggattggtggatagatggatggatggatggatggatggatggatggatagatggatgggtgagtggatagatggatggatggatgagcagatggttgggttgatgggtgggtgaatggatggatggttggatccatgggtaggtgagttgatggattgctgagtgggtgggtggatggatggatggacggatggatggatggatagatggattggtgagtggatggttgggttgatggatggttatgaagctatgaagaaaagtggtatcagaatcttgattctgcaggcatttatttggcatctattatgtgccaggaactgaggaccagctgaactgttaaggtcctctttcatgaagtcctccctagccactggcctgggttcagtcgaggtgagggcaaggaggtggaagtcatgcttgaactagcctggagatggaggaaacctgttccccaaaccagagcccaggaaaatgtggctaggctggaggagtgtgggcaggtccgctgacagggcatggcctgggaaagggggtcctgggttgagtggggttgtgcacagactgggagatgcagtgtggacttcaggtcagaggggagggatagagaagcggatttggaaggtcaggaaggggtgcacattccttgagcgcctgctgtgtgcagccgtacagtctgttgttcgaccctcgcagcatccctacttgttctaccttaataacttttcttgttaaatgcaaagaacctgagaaaatccaggccccgaatctgaccatcagtgattcagcctagcgcctcccttccccttcacagcacccttttccctagtgtggtccttcctttctagttgctcgtctcaccacgcagctgtttacaatcagcttggagctctggtcttcagccattgtagagaccaaacctcgtgaagtactctggtgcaatgtatttagggacaatcattttctatatgttcagggctttcctctctcataaatcagtccaagagaaatacttaacacctgctgtatgtttctaagaattcagccacgctttggctgggagtcagatcactttaaatattagaatgctttttgatagccagtggtcatttctcagtggaaagaaaaaggatgacatcgagtttgatttgtttctgattttgaaggttgctggggttttttttgttttatttttggttttgttttttgagacagagtcttgctctgtcgcccaggctggagtgcaatggcgcgatctcagctcactacaacctccgcctcctggattcaagtgattctcctgcctcagcctcctgagtagctgggactgcaggcgtgtcccaccacgctcggctaattttttgtatttttagtagagacggggtttcaccgtgttagccaggatggtcttgatctcctgaccttgtgatccgcccgcctcggcctcccaaagtgccgggatcacaggcgtgagccactacgcccggccaaaggttgctgtttttaatccctgttcatagaagaggaaattgagactcaggaaggtcaaataatccatctgggggtcctaccacggagccaggtcagtttgtatcctgcaggtctcaaagggcctacttagaacgtctgtggcaggtccctgtcccacatggagctcactgcatgagcactttcttctttctttctctgtccccagactgacccctgaggacagaccttcagtttctctacattcttatttagccagtgccaggcacacgtagcatgcgcagaccctctgtgcattggaactgttgataatattaatggtcccacatgcaccaggagtgtgtatttaaatatagacatttaagataaatatataaatatatcaacataagaatatgataattatatatacatatatcaacataagaatatgattactatatacatatatcaacataataatataattatatacatatatcaacataatataattatgtacatatagcaacataatatgataattatatatttatcatgtttatattttatatataaattttagagtaaatgtaaacattttatatgaacaaatatggatatttatatataattatatttacatataaatacacttatgtgtaaatataattatataataattatataaatttatatgtaaatttataaaatacactttaaactatttaaaatacagttatataaatttgacatactttataacatatatttttaatatattgttttatatgtataatagttatatatcatatatgaaactatataatatacagaaatataataataacagaaatagatctctttttttttgggacaggatcttgctctgtcacccaggctagaatgcagtggcacaatcttggctcattgcaaccttgaccttcccgggctcaaacaattctgccacctcagcctcctgagtagctgggactataagcacacaccaccatgcctggctaatttttgtattttttgtagagacagggttttgccacgttgcccacgctggtctcgaactcatgggcttgtgatctgcccgcctaagcctcccaaagtgctgggattacaagcgtgagccactgcacccagctgaaacaaagacatatctgactgttgcttgtggaggtgcctgccattcctccctacagtgattcacaggctcacccagcctctccttctccttcaagccccaaacctctgaatgccaggaagggtggtaagaagtgtctctgcgcctagtaccagtaaagttggcaggtcactgtggctagcgggggcaccattgttggcctcgggcctggggagagaaaaatatgacatacagggggcccacgggggtacgttaggttcagccctgtaagcccacactgaccctggtgggcagacccagcccagggaggggcaggcaggagtgaccccgtcatcaggttctgctggcgagcccagggtggtgacaggcgcacgtcttttgccgggagctgaagacgttcatgggctttcaagcaggacaaagcttcaatgtcatcaccaggtagcaggcagagcaagggtgctgacagcctgcagaagcctgtgcttatctctccatcggagctaaagcccatgtttgcttagggaacagcctgaaattccaccccagctgctgggcctttcacttttgaaacataagcccagagagcgaaaggggggaacgttgtgcccagattctctttctgagcgtgaacttgatgttcctgaccaggaaccagccactcgtaccgaaggccttcctgacccctcagttctcccctgagcctttgctgtgtcctgggcaccaagaggtggagataggctgtcaccgtgcacgtttcctaagcctgcagaggaactgttcacagaatccagcctggaatcagccgtttgtggcaaacagtcagtagctatttctcaacgtgtggttgtgaagctgcaggctccatattcgctcttcacagagcatccaagcaggtgtctcagtgccagctcacaccgttcacactgctcacaccagctctggagagctgcttgtacacatctctccacaagtccactttcagtgttgccacgtggtaccggaaatttgccatagaaattggccgatggtacgaccagagagccacctgttagatagttaccccacatccccaccctcaacaccaccttagacaaatcctactgtcagaacatgtggaacggagaagggaccttggcggttcattcataaatgtcagcacccataggtctgtgcctgtttggccgcagacactggggagcagcctgtagccttggcttgtgcagcttcctctgcaggaggggtgcctcttccaagaaacctgtcctgactccccagccctccccacctccattctcgcccccgctggacaatgcacaccctccatcagagcgtggtgcatacctttcatcctagatctcccaccagctttgaaaccagcatcctgttcatgatgtctggaaccctgggaactgtcccagcacctgtttagcacatgtgtgcatgcgaaggggatctgctgagtgctctgctctggtgggaaggccgctctgcacagctggagctgatgccttggcagatgctgggcatctgaatcgtgcagtgcaggagcacaggggcatggcaccgtttgttgctggggaacctaggcctcaaaagggcctcagcctctccgcagtgcagtgaggactgtcccatactctcactgcgtacagagtatgggagagtctctgtgaggctttgggtgccctgcagagggaaggcagtgccagctgggcctggtcgggggccatggagatggcgggcccaggctggggaggacttgtggcacccactcccttacccgctaacccggatcccctggaatctgcagaatgcctggggttgctcctcttctaccctgccgtggctgagctttgtctgtgccctgtcctctggccacggtctttgcctgatccctaccctggtacaggcagagctccctgcaacccccagctgtttccccagaactgacaccagtctccctgcaccacccatcctccttttgactgccctggggacgccactgctgctctgatcctctgtcactccagccacctcttgcttccctgttatcacaaacactgaacagtgagctcaggtgtcagcctccacagaggcatgcacagcaaggggtccggaggcatgccccatggagaactgggggtgctctgcttgcaggaggatccagggcccattgcagtcctcagatgttctgggggagaggatacgcctgcttcatttcttctcaggggtcagaactgggcacagggggttggaaggagggagaaagatgtctatcaggtacccactgcatgccaggccctcttctaggctcccttaaaacctttcaggtaggccagtcacggtcgctcatgcctgtaatcccagcactttgggaggccaaagcgggtggatcacctgaggtcaggagtttgagactagcctgatcaacatggagaaaccccgtctctactaaaaatataaaatgagccaggcatggtggcacatgcctgtaatcccagctactcgggaggctgaggcaggagaatggcttgaacccgggaggtggacgttgcaatgagccgagatcacgccattgcactccagcctgggcaacaagagtgaaactccgtcgcaaaaacaaaagacaaacaaaaaacacctgtcaggtaaatggtggtagagcagaaaacctgggctcagaagctggcattgatcccagagccatccagtttcaaagcccacacccacaactttcctccaggttgggcagtgcatgatggaaaggctgtcccagcaagtagtgagttcactttcaccagtccctggaggcaggagcagagcctgagctgaccacttggaaggagatgttattcaggggactcgagcatctggcgtaggatgggactccatgaggtctatgcctccttctagctctgaaactcctcaagggaaaccatttcccagatctctacgttgctgcagtcccttctaacttccagcacaccttctgctctctccgcaggtgtcgtgcgccaggtgcggcccatcgtgggcccatttcatgccgtcctgaagctggagatgaactatgtggtcgggggcgtggtctcccaccgaaatgttgtcaacgtccacatcttcgtctctgagtactggttctgagggctggtctgccgcacagccgcaggtgcacctccaggccaaatcattgctgccagtgactgtggtctgtacttgtttataccctcagacttttttaatgttaggtatttgtagcattaggccaacatgtattaagctgagccagatgaataagtccatctgatgtattttcggtgtttaaaaaatgagcccagttgctcaactgtttggttgaaaaccttgctcattttttaatgcgaaggctaagtgtcaccccctttctctgcctctggctgggccttgctaagggccaaggaaagaaagacattttttagggggcagccagtccaaatgccaaaagaagaccagttcttgccctgattgtatgaaatttgacattttggcactttttttttttttttggccaatcagattttctatgttctaaggacatggctgctgtagaatagcacagacgtggatgataaattatccccagaagcagcatgacagaatgcctcggggagcacttggaagggaaattgcagttctgttgaaatagaggaaaatcccttggtaaagacacagcctgttaggctcgtgtgggcctccagtatgttcaccaggggaatggctgggatttctcggcactctgcatcatccatcttttcttataggtgggaaaataaacaactttgtgatcctcctgat

SEQ ID NO: 149 - DNA, 2723 bp, Homo sapiens
tggacgcggatgtcctcctggaggcctgctgtgcggacggacaccggatggccactcatcagaaggactgctcgctgccatatgctacggaatccaaagaatgcaggatggtgcaggagcagtgctgccacagccagctggaggagctgcactgtgccacgggcatcagcctggccaacgagcaggaccgctgtgccacgccccacggtgacaacgccagcctggaggccacatttgtgaagaggtgctgccattgctgtctgctggggagggcggcccaggcccagggccagagctgcgagtacagcctcatggttggctaccagtgtggacaggtcttccgggcatgctgtgtcaagagccaggagaccggagatttggatgtcgggggcctccaagaaacggataagatcattgaggttgaggaggaacaagaggacccatatctgaatgaccgctgccgaggaggcgggccctgcaagcagcagtgccgagacacgggtgacgaggtggtctgctcctgcttcgtgggctaccagctgctgtctgatggtgtctcctgtgaagatgtcaatgaatgcatcacgggcagccacagctgccggcttggagaatcctgcatcaacacagtgggctctttccgctgccagcgggacagcagctgcgggactggctatgagctcacagaggacaatagctgcaaagatattgacgagtgtgagagtggtattcataactgcctccccgattttatctgtcagaatactctgggatccttccgctgccgacccaagctacagtgcaagagtggctttatacaagatgctctaggcaactgtattgatatcaatgagtgtttgagtatcagtgccccgtgccctattgggcatacatgcatcaacacagagggctcctacacgtgccagaagaacgtgcccaactgtggccgtggctaccatctcaacgaggagggaacgcgctgtgttgatgtggacgagtgcgcgccacctgctgagccctgtgggaagggacatcgctgcgtgaactctcccggcagtttccgctgcgaatgcaagacgggttactattttgacggcatcagcaggatgtgtgtcgatgtcaacgagtgccagcgctaccccgggcgcctgtgtggccacaagtgcgagaacacgctgggctcctacctctgcagctgttccgtgggcttccggctctctgtggatggcaggtcatgtgaagacatcaatgagtgcagcagcagcccctgtagccaggagtgtgccaacgtctacggctcctaccagtgttactgccggcgaggctaccagctcagcgatgtggatggagtcacctgtgaagacatcgacgagtgcgccctgcccaccgggggccacatctgctcctaccgctgcatcaacatccctggaagcttccagtgcagctgcccctcgtctggctacaggctggcccccaatggccgcaactgccaagacattgatgagtgtgtgactggcatccacaactgctccatcaacgagacctgcttcaacatccagggcggcttccgctgcctggccttcgagtgccctgagaactaccgccgctccgcagccacgctccagcaggagaagacagacacggtccgctgcatcaagtcctgccgccccaacgatgtcacatgcgtgttcgaccccgtgcacaccatctcccacaccgtcatctcgctgcctaccttccgcgagttcacccgccctgaagagatcatcttcctccgggccatcacgccaccgcatcctgccagccaggctaacatcatcttcgacatcacggaagggaacctgcgggactcttttgacatcatcaagcgttacatggacggcatgaccgtgggtgtcgtgcgccaggtgcggcccatcgtgggcccatttcatgccgtcctgaagctggagatgaactatgtggtcgggggcgtggtctcccaccgaaatgttgtcaacgtccacatcttcgtctctgagtactggttctgagggctggtctgccgcacagccgcaggtgcacctccaggccaaatcattgctgccagtgactgtggtctgtacttgtttataccctcagacttttttaatgttaggtatttgtagcattaggccaacatgtattaagctgagccagatgaataagtccatctgatgtattttcggtgtttaaaaaatgagcccagttgctcaactgtttggttgaaaaccttgctcattttttaatgcgaaggctaagtgtcaccccctttctctgcctctggctgggccttgctaagggccaaggaaagaaagacattttttagggggcagccagtccaaatgccaaaagaagaccagttcttgccctgattgtatgaaatttgacattttggcactttttttttttttttggccaatcagattttctatgttctaaggacatggctgctgtagaatagcacagacgtggatgataaattatccccagaagcagcatgacagaatgcctcggggagcacttggaagggaaattgcagttctgttgaaatagaggaaaatcccttggtaaagacacagcctgttaggctcgtgtgggcctccagtatgttcaccaggggaatggctgggatttctcggcactctgcatcatccatcttttcttataggtgggaaaataaacaactttgtgatcctcctgat

SEQ ID NO: 150 - protein, 659 aa, Homo sapiens
MATHQKDCSLPYATESKECRMVQEQCCHSQLEELHCATGISLANEQDRCATPHGDNASLEATFVKRCCHCCLLGRAAQAQGQSCEYSLMVGYQCGQVFRACCVKSQETGDLDVGGLQETDKIIEVEEEQEDPYLNDRCRGGGPCKQQCRDTGDEVVCSCFVGYQLLSDGVSCEDVNECITGSHSCRLGESCINTVGSFRCQRDSSCGTGYELTEDNSCKDIDECESGIHNCLPDFICQNTLGSFRCRPKLQCKSGFIQDALGNCIDINECLSISAPCPIGHTCINTEGSYTCQKNVPNCGRGYHLNEEGTRCVDVDECAPPAEPCGKGHRCVNSPGSFRCECKTGYYFDGISRMCVDVNECQRYPGRLCGHKCENTLGSYLCSCSVGFRLSVDGRSCEDINECSSSPCSQECANVYGSYQCYCRRGYQLSDVDGVTCEDIDECALPTGGHICSYRCINIPGSFQCSCPSSGYRLAPNGRNCQDIDECVTGIHNCSINETCFNIQGGFRCLAFECPENYRRSAATLQQEKTDTVRCIKSCRPNDVTCVFDPVHTISHTVISLPTFREFWEEIIFLRAITPPHPASQANIIFDITEGNLRDSFDIIKRYMDGMTVGVVRQVRPIVGPFHAVLKLEMNYVVGGVVSHRNVVNVHIFVSEYWF

SEQ ID NO: 151 - DNA, 2436 bp, Homo sapiens
tggacgcggatgtcctcctggaggcctgctgtgcggacggacaccggatggccactcatcagaaggactgctcgctgccatatgctacggaatccaaagaatgcaggatggtgcaggagcagtgctgccacagccagctggaggagctgcactgtgccacgggcatcagcctggccaacgagcaggaccgctgtgccacgccccacggtgacaacgccagcctggaggccacatttgtgaagaggtgctgccattgctgtctgctggggagggcggcccaggcccagggccagagctgcgagtacagcctcatggttggctaccagtgtggacaggtcttccgggcatgctgtgtcaagagccaggagaccggagatttggatgtcgggggcctccaagaaacggataagatcattgaggttgaggaggaacaagaggacccatatctgaatgaccgctgccgaggaggcgggccctgcaagcagcagtgccgagacacgggtgacgaggtggtctgctcctgcttcgtgggctaccagctgctgtctgatggtgtctcctgtgaagatgtcaatgaatgcatcacgggcagccacagctgccggcttggagaatcctgcatcaacacagtgggctctttccgctgccagcgggacagcagctgcgggactggctatgagctcacagaggacaatagctgcaaagatattgacgagtgtgagagtggtattcataactgcctccccgattttatctgtcagaatactctgggatccttccgctgccgacccaagctacagtgcaagagtggctttatacaagatgctctaggcaactgtattgatatcaatgagtgtttgagtatcagtgccccgtgccctattgggcatacatgcatcaacacagagggctcctacacgtgccagaagaacgtgcccaactgtggccgtggctaccatctcaacgaggagggaacgcgctgtgttgatgtggacgagtgcgcgccacctgctgagccctgtgggaagggacatcgctgcgtgaactctcccggcagtttccgctgcgaatgcaagacgggttactattttgacggcatcagcaggatgtgtgtcgatgtcaacgagtgccagcgctaccccgggcgcctgtgtggccacaagtgcgagaacacgctgggctcctacctctgcagctgttccgtgggcttccggctctctgtggatggcaggtcatgtgaagacatcaatgagtgcagcagcagcccctgtagccaggagtgtgccaacgtctacggctcctaccagtgttactgccggcgaggctaccagctcagcgatgtggatggagtcacctgtgaagacatcgacgagtgcgccctgcccaccgggggccacatctgctcctaccgctgcatcaacatccctggaagcttccagtgcagctgcccctcgtctggctacaggctggcccccaatggccgcaactgccaagacattgatgagtgtgtgactggcatccacaactgctccatcaacgagacctgcttcaacatccagggcggcttccgctgcctggccttcgagtgccctgagaactaccgccgctccgcagccacgcagaaatccaagaagggaaggcagaacaccccagcgggatcaagtaaagaggactgcagggttcttccatggaagcaggggttggaggatacccaccttgatgcctagtgaggaagatggacctggacagacagtcagctccacaccttgcgctgagcagctgtgattgtgccacgggagcatgagcccttttccccacggcccttgccactgtctcctggccctctctctgatcatgccaggtttgcaccagcctcgagtctcccatgttgtagtacattctccaagatgcagcccaggagcctctctgaaggaccagtctggttacgatggtctgagcttccttagaaccttccatggttgtcttttcccagcagatgaagcatagcctccttggaatggcatgggaggcctggcctgatctggcctctgcccaccctttgagctgtacctgccccaccccagctcatccatgtgcttgtaccctggccccacggggaggcttgcccttccctgaatctgccttcttgtggctttagcatgtgccatgctgtccccctgcagactgccattctccttgcagacttggctcagaagtcacctcctcagtgcagttagcctgagctcccctggccccaggtgcctccatcagagcatttaccccattgtgttgtggctgttccttaacgtccccactagccaggctctttgagggcagggattgtgtctggttaatttctgtattctctgcaactttgcaatgtttggcttgaagaaggagctcagtaaacatctgaataaacatgcaggttgatgg

SEQ ID NO: 152 - protein, 559 aa, Homo sapiens
MATHQKDCSLPYATESKECRMVQEQCCHSQLEELHCATGISLANEQDRCATPHGDNASLEATFVKRCCHCCLLGRAAQAQGQSCEYSLMVGYQCGQVFRACCVKSQETGDLDVGGLQETDKIIEVEEEQEDPYLNDRCRGGGPCKQQCRDTGDEVVCSCFVGYQLLSDGVSCEDVNECITGSHSCRLGESCINTVGSFRCQRDSSCGTGYELTEDNSCKDIDECESGIHNCLPDFICQNTLGSFRCRPKLQCKSGFIQDALGNCIDINECLSISAPCPIGHTCINTEGSYTCQKNVPNCGRGYHLNEEGTRCVDVDECAPPAEPCGKGHRCVNSPGSFRCECKTGYYFDGISRMCVDVNECQRYPGRLCGHKCENTLGSYLCSCSVGFRLSVDGRSCEDINECSSSPCSQECANVYGSYQCYCRRGYQLSDVDGVTCEDIDECALPTGGHICSYRCINIPGSFQCSCPSSGYRLAPNGRNCQDIDECVTGIHNCSINETCFNIQGGFRCLAFECPENYRRSAATQKSKKGRQNTPAGSSKEDCRVLPWKQGLEDTHLDA

SEQ ID NO: 153 - DNA, 1850 bp, Homo sapiens
cagcgttggctgccgaggctcggccggagcgtggagcccgcgccgctgccccaggaccgcgcccgcgcctttgtccgccgccgcccaccgcccgtcgcccgccgcccatggagcgcgccgcgccgtcgcgccgggtcccgcttccgctgctgctgctcggcggccttgcgctgctggcggccggagtggacgcggatgtcctcctggaggcctgctgtgcggacggacaccggatggccactcatcagaaggactgctcgctgccatatgctacggaatccaaagaatgcaggatggtgcaggagcagtgctgccacagccagctggaggagctgcactgtgccacgggcatcagcctggccaacgagcaggaccgctgtgccacgccccacggtgacaacgccagcctggaggccacatttgtgaagaggtgctgccattgctgtctgctggggagggcggcccaggcccagggccagagctgcgagtacagcctcatggttggctaccagtgtggacaggtcttccgggcatgctgtgtcaagagccaggagaccggagatttggatgtcgggggcctccaagaaacggataagatcattgaggttgaggaggaacaagaggacccatatctgaatgaccgctgccgaggaggcgggccctgcaagcagcagtgccgagacacgggtgacgaggtggtctgctcctgcttcgtgggctaccagctgctgtctgatggtgtctcctgtgaagatgtcaatgaatgcatcacgggcagccacagctgccggcttggagaatcctgcatcaacacagtgggctctttccgctgccagcgggacagcagctgcgggactggctatgagctcacagaggacaatagctgcaaagatattgacgagtgtgagagtggtattcataactgcctccccgattttatctgtcagaatactctgggatccttccgctgccgacccaagctacagtgcaagagtggctttatacaagatgctctaggcaactgtattgatatcaatgagtgtttgagtatcagtgccccgtgccctattgggcatacatgcatcaacacagagggctcctacacgtgccagaagaacgtgcccaactgtggccgtggctaccatctcaacgaggagggaacgcgctgtgttgatgtggacgagtgcgcgccacctgctgagccctgtgggaagggacatcgctgcgtgaactctcccggcagtttccgctgcgaatgcaagacgggttactattttgacggcatcagcaggatgtgtgtcgatgtcaacgagtgccagcgctaccccgggcgcctgtgtggccacaagtgcgagaacacgctgggctcctacctctgcagctgttccgtgggcttccggctctctgtggatggcaggtcatgtgaagacatcaatgagtgcagcagcagcccctgtagccaggagtgtgccaacgtctacggctcctaccagtgttactgccggcgaggctaccagctcagcgatgtggatggagtcacctgtgaagacatcgacgagtgcgccctgcccaccgggggccacatctgctcctaccgctgcatcaacatccctggaagcttccagtgcagctgcccctcgtctggctacaggctggcccccaatggccgcaactgccaagacattgatgagtgtgtgactggcatccacaactgctccatcaacgagacctgcttcaacatccagggcggcttccgctgcctggccttcgagtgccctgagaactaccgccgctccgcagccacggtggaagccttgggcaagctctctgggcctcagtttcctcatctg

SEQ ID NO: 154 - protein, 581 aa, Homo sapiens [sequence omitted]

SEQ ID NO: 155 - DNA, 2215 bp, Homo sapiens
cagcgttggctgccgaggctcggccggagcgtggagcccgcgccgctgccccaggaccgcgcccgcgcctttgtccgccgccgcccaccgcccgtcgcccgccgcccatggagcgcgccgcgccgtcgcgccgggtcccgcttccgctgctgctgctcggcggccttgcgctgctggcggccggagtggacgcggatgtcctcctggaggcctgctgtgcggacggacaccggatggccactcatcagaaggactgctcgctgccatatgctacggaatccaaagaatgcaggatggtgcaggagcagtgctgccacagccagctggaggagctgcactgtgccacgggcatcagcctggccaacgagcaggaccgctgtgccacgccccacggtgacaacgccagcctggaggccacatttgtgaagaggtgctgccattgctgtctgctggggagggcggcccaggcccagggccagagctgcgagtacagcctcatggttggctaccagtgtggacaggtcttccgggcatgctgtgtcaagagccaggagaccggagatttggatgtcgggggcctccaagaaacggataagatcattgaggttgaggaggaacaagaggacccatatctgaatgaccgctgccgaggaggcgggccctgcaagcagcagtgccgagacacgggtgacgaggtggtctgctcctgcttcgtgggctaccagctgctgtctgatggtgtctcctgtgaagatgtcaatgaatgcatcacgggcagccacagctgccggcttggagaatcctgcatcaacacagtgggctctttccgctgccagcgggacagcagctgcgggactggctatgagctcacagaggacaatagctgcaaagatattgacgagtgtgagagtggtattcataactgcctccccgattttatctgtcagaatactctgggatccttccgctgccgacccaagctacagtgcaagagtggctttatacaagatgctctaggcaactgtattgatatcaatgagtgtttgagtatcagtgccccgtgccctattgggcatacatgcatcaacacagagggctcctacacgtgccagaagaacgtgcccaactgtggccgtggctaccatctcaacgaggagggaacgcgctgtgttgatgtggacgagtgcgcgccacctgctgagccctgtgggaagggacatcgctgcgtgaactctcccggcagtttccgctgcgaatgcaagacgggttactattttgacggcatcagcaggatgtgtgtcgatgtcaacgagtgccagcgctaccccgggcgcctgtgtggccacaagtgcgagaacacgctgggctcctacctctgcagctgttccgtgggcttccggctctctgtggatggcaggtcatgtgaagacatcaatgagtgcagcagcagcccctgtagccaggagtgtgccaacgtctacggctcctaccagtgttactgccggcgaggctaccagctcagcgatgtggatggagtcacctgtgaagacatcgacgagtgcgccctgcccaccgggggccacatctgctcctaccgctgcatcaacatccctggaagcttccagtgcagctgcccctcgtctggctacaggctggcccccaatggccgcaactgccaagacattgatgagtgtgtgactggcatccacaactgctccatcaacgagacctgcttcaacatccagggcggcttccgctgcctggccttcgagtgccctgagaactaccgccgctccgcagccacccgctgtgagcgcttgccttgccatgagaatcgggagtgctccaagctgcctctgagaataacctactaccacctctctttccccaccaacatccaagcgcccgcggtggttttccgcatgggcccctccagtgctgtccccggggacagcatgcagctggccatcaccggcggcaatgaggagggctttttcaccacccggaaggtgacctgtccccgagcccagggacttgctcctgaccgtcaagatggatctctctcgccacggcaccgtcagctcctttgtggccaagcttttcatctttgtgtctgcagagctctgagcactcgcttcgcgtcgcggggtctccctcctgttgctttcctaaccctgccctccggggcgttaataaagtcttagcaagcgtccca

SEQ ID NO: 156 - protein, 698 aa, Homo sapiens [sequence omitted]

SEQ ID NO: 157 - DNA, 2069 bp, Homo sapiens
tggacgcggatgtcctcctggaggcctgctgtgcggacggacaccggatggccactcatcagaaggactgctcgctgccatatgctacggaatccaaagaatgcaggatggtgcaggagcagtgctgccacagccagctggaggagctgcactgtgccacgggcatcagcctggccaacgagcaggaccgctgtgccacgccccacggtgacaacgccagcctggaggccacatttgtgaagaggtgctgccattgctgtctgctggggagggcggcccaggcccagggccagagctgcgagtacagcctcatggttggctaccagtgtggacaggtcttccgggcatgctgtgtcaagagccaggagaccggagatttggatgtcgggggcctccaagaaacggataagatcattgaggttgaggaggaacaagaggacccatatctgaatgaccgctgccgaggaggcgggccctgcaagcagcagtgccgagacacgggtgacgaggtggtctgctcctgcttcgtgggctaccagctgctgtctgatggtgtctcctgtgaagatgtcaatgaatgcatcacgggcagccacagctgccggcttggagaatcctgcatcaacacagtgggctctttccgctgccagcgggacagcagctgcgggactggctatgagctcacagaggacaatagctgcaaagatattgacgagtgtgagagtggtattcataactgcctccccgattttatctgtcagaatactctgggatccttccgctgccgacccaagctacagtgcaagagtggctttatacaagatgctctaggcaactgtattgatatcaatgagtgtttgagtatcagtgccccgtgccctattgggcatacatgcatcaacacagagggctcctacacgtgccagaagaacgtgcccaactgtggccgtggctaccatctcaacgaggagggaacgcgctgtgttgatgtggacgagtgcgcgccacctgctgagccctgtgggaagggacatcgctgcgtgaactctcccggcagtttccgctgcgaatgcaagacgggttactattttgacggcatcagcaggatgtgtgtcgatgtcaacgagtgccagcgctaccccgggcgcctgtgtggccacaagtgcgagaacacgctgggctcctacctctgcagctgttccgtgggcttccggctctctgtggatggcaggtcatgtgaagacatcaatgagtgcagcagcagcccctgtagccaggagtgtgccaacgtctacggctcctaccagtgttactgccggcgaggctaccagctcagcgatgtggatggagtcacctgtgaagacatcgacgagtgcgccctgcccaccgggggccacatctgctcctaccgctgcatcaacatccctggaagcttccagtgcagctgcccctcgtctggctacaggctggcccccaatggccgcaactgccaagacattgatgagtgtgtgactggcatccacaactgctccatcaacgagacctgcttcaacatccagggcggcttccgctgcctggccttcgagtgccctgagaactaccgccgctccgcagccacccgctgtgagcgcttgccttgccatgagaatcgggagtgctccaagctgcctctgagaataacctactaccacctctctttccccaccaacatccaagcgcccgcggtggttttccgcatgggcccctccagtgctgtccccggggacagcatgcagctggccatcaccggcggcaatgaggagggctttttcaccacccggaaggtgagcccccacagtggggtggtggccctcaccaagcctgtccccgagcccagggacttgctcctgaccgtcaagatggatctctctcgccacggcaccgtcagctcctttgtggccaagcttttcatctttgtgtctgcagagctctgagcactcgcttcgcgtcgcggggtctccctcctgttgctttcctaaccctgccctccggggcgttaataaagtcttagcaagcgtcccacacagtga

SEQ ID NO: 158 - protein, 639 aa, Homo sapiens
MATHQKDCSLPYATESKECRMVQEQCCHSQLEELHCATGISLANEQDRCATPHGDNASLEATFVKRCCHCCLLGRAAQAQGQSCEYSLMVGYQCGQVFRACCVKSQETGDLDVGGLQETDKIIEVEEEQEDPYLNDRCRGGGPCKQQCRDTGDEVVCSCFVGYQLLSDGVSCEDVNECITGSHSCRLGESCINTVGSFRCQRDSSCGTGYELTEDNSCKDIDECESGIHNCLPDFICQNTLGSFRCRPKLQCKSGFIQDALGNCIDINECLSISAPCPIGHTCINTEGSYTCQKNVPNCGRGYHLNEEGTRCVDVDECAPPAEPCGKGHRCVNSPGSFRCECKTGYYFDGISRMCVDVNECQRYPGRLCGHKCENTLGSYLCSCSVGFRLSVDGRSCEDINECSSSPCSQECANVYGSYQCYCRRGYQLSDVDGVTCEDIDECALPTGGHICSYRCINIPGSFQCSCPSSGYRLAPNGRNCQDIDECVTGIHNCSINETCFNIQGGFRCLAFECPENYRRSAATRCERLPCHENRECSKLPLRITYYHLSFPTNIQAPAVVFRMGPSSAVPGDSMQLAITGGNEEGFFTTRKVSPHSGVVTKPVPEPRDLLLTVKMDLSRHGTVSSFVAKLFIFVSAEL

SEQ ID NO: 159 - DNA, 2259 bp, Homo sapiens
tggacgcggatgtcctcctggaggcctgctgtgcggacggacaccggatggccactcatcagaaggactgctcgctgccatatgctacggaatccaaagaatgcaggatggtgcaggagcagtgctgccacagccagctggaggagctgcactgtgccacgggcatcagcctggccaacgagcaggaccgctgtgccacgccccacggtgacaacgccagcctggaggccacatttgtgaagaggtgctgccattgctgtctgctggggagggcggcccaggcccagggccagagctgcgagtacagcctcatggttggctaccagtgtggacaggtcttccgggcatgctgtgtcaagagccaggagaccggagatttggatgtcgggggcctccaagaaacggataagatcattgaggttgaggaggaacaagaggacccatatctgaatgaccgctgccgaggaggcgggccctgcaagcagcagtgccgagacacgggtgacgaggtggtctgctcctgcttcgtgggctaccagctgctgtctgatggtgtctcctgtgaagatgtcaatgaatgcatcacgggcagccacagctgccggcttggagaatcctgcatcaacacagtgggctctttccgctgccagcgggacagcagctgcgggactggctatgagctcacagaggacaatagctgcaaagatattgacgagtgtgagagtggtattcataactgcctccccgattttatctgtcagaatactctgggatccttccgctgccgacccaagctacagtgcaagagtggctttatacaagatgctctaggcaactgtattgatatcaatgagtgtttgagtatcagtgccccgtgccctattgggcatacatgcatcaacacagagggctcctacacgtgccagaagaacgtgcccaactgtggccgtggctaccatctcaacgaggagggaacgcgctgtgttgatgtggacgagtgcgcgccacctgctgagccctgtgggaagggacatcgctgcgtgaactctcccggcagtttccgctgcgaatgcaagacgggttactattttgacggcatcagcaggatgtgtgtcgatgtcaacgagtgccagcgctaccccgggcgcctgtgtggccacaagtgcgagaacacgctgggctcctacctctgcagctgttccgtgggcttccggctctctgtggatggcaggtcatgtgaagacatcaatgagtgcagcagcagcccctgtagccaggagtgtgccaacgtctacggctcctaccagtgttactgccggcgaggctaccagctcagcgatgtggatggagtcacctgtgaagacatcgacgagtgcgccctgcccaccgggggccacatctgctcctaccgctgcatcaacatccctggaagcttccagtgcagctgcccctcgtctggctacaggctggcccccaatggccgcaactgccaagacattgatgagtgtgtgactggcatccacaactgctccatcaacgagacctgcttcaacatccagggcggcttccgctgcctggccttcgagtgccctgagaactaccgccgctccgcagccacatgatcgtagggaactctgcatgaggccatcggtgcaggctggagaagagaaggcaagttggcaggagtggagaccacgggcatttgagccacttcctcatgtaacttaacttgtgccttcaggacctgctcaagcccgatcacgtatataccacttccatttgatgatggaatgctgctgttcatgaccaactttatggctagatgggtcagaaagcacccagttcatgataggcagttcaggtcatatggtgacttgatgacccagagtcaaacattcagtttccaccaaagcccagtaacaggccaagagctgtctctcaaaaggagagtagttatctgcagaagatggcagggccttgctccgaaagcctagagaccgccactgtgattcacctatgggggcctgccaaaggctgcagccagcatccttatctgccactgacacctcaagcaacattggatctgctgggtcatatggcccaagtggcagagcaacttgcacaacagcctggacctgtcatagagctttctcctgttctggaccccactcaaaactggcagcctttcaggtcactcgataaatgtgctggagtaacactcaaacgaggaatgtgttgcctccaaaatccaataggccc

SEQ ID NO: 160 - protein, 524 aa, Homo sapiens
MATHQKDCSLPYATESKECRMVQEQCCHSQLEELHCATGISLANEQDRCATPHGDNASLEATFVKRCCHCCLLGRAAQAQGQSCEYSLMVGYQCGQVFRACCVKSQETGDLDVGGLQETDKIIEVEEEQEDPYLNDRCRGGGPCKQQCRDTGDEVVCSCFVGYQLLSDGVSCEDVNECITGSHSCRLGESCINTVGSFRCQRDSSCGTGYELTEDNSCKDIDECESGIHNCLPDFICQNTLGSFRCRPKLQCKSGFIQDALGNCIDINECLSISAPCPIGHTCINTEGSYTCQKNVPNCGRGYHLNEEGTRCVDVDECAPPAEPCGKGHRCVNSPGSFRCECKTGYYFDGISRMCVDVNECQRYPGRLCGHKCENTLGSYLCSCSVGFRLSVDGRSCEDINECSSSPCSQECANVYGSYQCYCRRGYQLSDVDGVTCEDIDECALPTGGHICSYRCINIPGSFQCSCPSSGYRLAPNGRNCQDIDECVTGIHNCSINETCFNIQGGFRCLAFECPENYRRSAAT

SEQ ID NO: 161 - DNA, 2445 bp, Homo sapiens
cagcgttggctgccgaggctcggccggagcgtggagcccgcgccgctgccccaggaccgcgcccgcgcctttgtccgccgccgcccaccgcccgtcgcccgccgcccatggagcgcgccgcgccgtcgcgccgggtcccgcttccgctgctgctgctcggcggccttgcgctgctggcggccggagtggacgcggatgtcctcctggaggcctgctgtgcggacggacaccggatggccactcatcagaaggactgctcgctgccatatgctacggaatccaaagaatgcaggatggtgcaggagcagtgctgccacagccagctggaggagctgcactgtgccacgggcatcagcctggccaacgagcaggaccgctgtgccacgccccacggtgacaacgccagcctggaggccacatttgtgaagaggtgctgccattgctgtctgctggggagggcggcccaggcccagggccagagctgcgagtacagcctcatggttggctaccagtgtggacaggtcttccgggcatgctgtgtcaagagccaggagaccggagatttggatgtcgggggcctccaagaaacggataagatcattgaggttgaggaggaacaagaggacccatatctgaatgaccgctgccgaggaggcgggccctgcaagcagcagtgccgagacacgggtgacgaggtggtctgctcctgcttcgtgggctaccagctgctgtctgatggtgtctcctgtgaagatgtcaatgaatgcatcacgggcagccacagctgccggcttggagaatcctgcatcaacacagtgggctctttccgctgccagcgggacagcagctgcgggactggctatgagctcacagaggacaatagctgcaaagatattgacgagtgtgagagtggtattcataactgcctccccgattttatctgtcagaatactctgggatccttccgctgccgacccaagctacagtgcaagagtggctttatacaagatgctctaggcaactgtattgatatcaatgagtgtttgagtatcagtgccccgtgccctattgggcatacatgcatcaacacagagggctcctacacgtgccagaagaacgtgcccaactgtggccgtggctaccatctcaacgaggagggaacgcgctgtgttgatgtggacgagtgcgcgccacctgctgagccctgtgggaagggacatcgctgcgtgaactctcccggcagtttccgctgcgaatgcaagacgggttactattttgacggcatcagcaggatgtgtgtcgatgtcaacgagtgccagcgctaccccgggcgcctgtgtggccacaagtgcgagaacacgctgggctcctacctctgcagctgttccgtgggcttccggctctctgtggatggcaggtcatgtgaagacatcaatgagtgcagcagcagcccctgtagccaggagtgtgccaacgtctacggctcctaccagtgttactgccggcgaggctaccagctcagcgatgtggatggagtcacctgtgaagacatcgacgagtgcgccctgcccaccgggggccacatctgctcctaccgctgcatcaacatccctggaagcttccagtgcagctgcccctcgtctggctacaggctggcccccaatggccgcaactgccaagacattgatgagtgtgtgactggcatccacaactgctccatcaacgagacctgcttcaacatccagggcggcttccgctgcctggccttcgagtgccctgagaactaccgccgctccgcagccacatgatcgtagggaactctgcatgaggccatcggtgcaggctggagaagagaaggcaagttggcaggagtggagaccacgggcatttgagccacttcctcatgtaacttaacttgtgccttcaggacctgctcaagcccgatcacgtatataccacttccatttgatgatggaatgctgctgttcatgaccaactttatggctagatgggtcagaaagcacccagttcatgataggcagttcaggtcatatggtgacttgatgacccagagtcaaacattcagtttccaccaaagcccagtaacaggccaagagctgtctctcaaaaggagagtagttatctgcagaagatggcagggccttgctccgaaagcctagagaccgccactgtgattcacctatgggggcctgccaaaggctgcagccagcatccttatctgccactgacacctcaagcaacattggatctgctgggtcatatggcccaagtggcagagcaacttgcacaacagcctggacctgtcatagagctttctcctgttctggaccccactcaaaactggcagcctttcaggtcactcgataaatgtgctggagtaacactcaaacgaggaatgtgttgcctccaaaatccaataggccc

SEQ ID NO: 162 - protein, 566 aa, Homo sapiens
MERAAPSRRVPLPLLLLGGLALLAAGVDADVLLEACCADGHRMATHQKDCSLPYATESKECRMVQEQCCHSQLEELHCATGISLANEQDRCATPHGDNASLEATFVKRCCHCCLLGRAAQAQGQSCEYSLMVGYQCGQVFRACCVKSQETGDLDVGGLQETDKIIEVEEEQEDPYLNDRCRGGGPCKQQCRDTGDEVVCSCFVGYQLLSDGVSCEDVNECITGSHSCRLGESCINTVGSFRCQRDSSCGTGYELTEDNSCKDIDECESGIHNCLPDFICQNTLGSFRCRPKLQCKSGFIQDALGNCIDINECLSISAPCPIGHTCINTEGSYTCQKNVPNCGRGYHLNEEGTRCVDVDECAPPAEPCGKGHRCVNSPGSFRCECKTGYYFDGISRMCVDVNECQRYPGRLCGHKCENTLGSYLCSCSVGFRLSVDGRSCEDINECSSSPCSQECANVYGSYQCYCRRGYQLSDVDGVTCEDIDECALPTGGHICSYRCINIPGSFQCSCPSSGYRLAPNGRNCQDIDECVTGIHNCSINETCFNIQGGFRCLAFECPENYRRSAAT

SEQ ID NO: 163 - DNA, 2909 bp, Homo sapiens
cagcgttggctgccgaggctcggccggagcgtggagcccgcgccgctgccccaggaccgcgcccgcgcctttgtccgccgccgcccaccgcccgtcgcccgccgcccatggagcgcgccgcgccgtcgcgccgggtcccgcttccgctgctgctgctcggcggccttgcgctgctggcggccggagtggacgcggatgtcctcctggaggcctgctgtgcggacggacaccggatggccactcatcagaaggactgctcgctgccatatgctacggaatccaaagaatgcaggatggtgcaggagcagtgctgccacagccagctggaggagctgcactgtgccacgggcatcagcctggccaacgagcaggaccgctgtgccacgccccacggtgacaacgccagcctggaggccacatttgtgaagaggtgctgccattgctgtctgctggggagggcggcccaggcccagggccagagctgcgagtacagcctcatggttggctaccagtgtggacaggtcttccgggcatgctgtgtcaagagccaggagaccggagatttggatgtcgggggcctccaagaaacggataagatcattgaggttgaggaggaacaagaggacccatatctgaatgaccgctgccgaggaggcgggccctgcaagcagcagtgccgagacacgggtgacgaggtggtctgctcctgcttcgtgggctaccagctgctgtctgatggtgtctcctgtgaagatgtcaatgaatgcatcacgggcagccacagctgccggcttggagaatcctgcatcaacacagtgggctctttccgctgccagcgggacagcagctgcgggactggctatgagctcacagaggacaatagctgcaaagatattgacgagtgtgagagtggtattcataactgcctccccgattttatctgtcagaatactctgggatccttccgctgccgacccaagctacagtgcaagagtggctttatacaagatgctctaggcaactgtattgatatcaatgagtgtttgagtatcagtgccccgtgccctattgggcatacatgcatcaacacagagggctcctacacgtgccagaagaacgtgcccaactgtggccgtggctaccatctcaacgaggagggaacgcgctgtgttgatgtggacgagtgcgcgccacctgctgagccctgtgggaagggacatcgctgcgtgaactctcccggcagtttccgctgcgaatgcaagacgggttactattttgacggcatcagcaggatgtgtgtcgatgtcaacgagtgccagcgctaccccgggcgcctgtgtggccacaagtgcgagaacacgctgggctcctacctctgcagctgttccgtgggcttccggctctctgtggatggcaggtcatgtgaagacatcaatgagtgcagcagcagcccctgtagccaggagtgtgccaacgtctacggctcctaccagtgttactgccggcgaggctaccagctcagcgatgtggatggagtcacctgtgaagacatcgacgagtgcgccctgcccaccgggggccacatctgctcctaccgctgcatcaacatccctggaagcttccagtgcagctgcccctcgtctggctacaggctggcccccaatggccgcaactgccaagacattgatgagtgtgtgactggcatccacaactgctccatcaacgagacctgcttcaacatccagggcggcttccgctgcctggccttcgagtgccctgagaactaccgccgctccgcagccacgctccagcaggagaagacagacacggtccgctgcatcaagtcctgccgccccaacgatgtcacatgcgtgttcgaccccgtgcacaccatctcccacaccgtcatctcgctgcctaccttccgcgagttcacccgccctgaagagatcatcttcctccgggccatcacgccaccgcatcctgccagccaggctaacatcatcttcgacatcacggaagggaacctgcgggactcttttgacatcatcaagcgttacatggacggcatgaccgtgggtgtcgtgcgccaggtgcggcccatcgtgggcccatttcatgccgtcctgaagctggagatgaactatgtggtcgggggcgtggtctcccaccgaaatgttgtcaacgtccacatcttcgtctctgagtactggttctgagggctggtctgccgcacagccgcaggtgcacctccaggccaaatcattgctgccagtgactgtggtctgtacttgtttataccctcagacttttttaatgttaggtatttgtagcattaggccaacatgtattaagctgagccagatgaataagtccatctgatgtattttcggtgtttaaaaaatgagcccagttgctcaactgtttggttgaaaaccttgctcattttttaatgcgaaggctaagtgtcaccccctttctctgcctctggctgggccttgctaagggccaaggaaagaaagacattttttagggggcagccagtccaaatgccaaaagaagaccagttcttgccctgattgtatgaaatttgacattttggcactttttttttttttttggccaatcagattttctatgttctaaggacatggctgctgtagaatagcacagacgtggatgataaattatccccagaagcagcatgacagaatgcctcggggagcacttggaagggaaattgcagttctgttgaaatagaggaaaatcccttggtaaagacacagcctgttaggctcgtgtgggcctccagtatgttcaccaggggaatggctgggatttctcggcactctgcatcatccatcttttcttataggtgggaaaataaacaactttgtgatcctcctgat

SEQ ID NO: 164 - protein, 701 aa, Homo sapiens
MERAAPSRRVPLPLLLLGGLALLAAGVDADVLLEACCADGHRMATHQKDCSLPYATESKECRMVQEQCCHSQLEELHCATGISLANEQDRCATPHGDNASLEATFVKRCCHCCLLGRAAQAQGQSCEYSLMVGYQCGQVFRACCVKSQETGDLDVGGLQETDKIIEVEEEQEDPYLNDRCRGGGPCKQQCRDTGDEVVCSCFVGYQLLSDGVSCEDVNECITGSHSCRLGESCINTVGSFRCQRDSSCGTGYELTEDNSCKDIDECESGIHNCLPDFICQNTLGSFRCRPKLQCKSGFIQDALGNCIDINECLSISAPCPIGHTCINTEGSYTCQKNVPNCGRGYHLNEEGTRCVDVDECAPPAEPCGKGHRCVNSPGSFRCECKTGYYFDGISRMCVDVNECQRYPGRLCGHKCENTLGSYLCSCSVGFRLSVDGRSCEDINECSSSPCSQECANVYGSYQCYCRRGYQLSDVDGVTCEDIDECALPTGGHICSYRCINIPGSFQCSCPSSGYRLAPNGRNCQDIDECVTGIHNCSINETCFNIQGGFRCLAFECPENYRRSAATLQQEKTDTVRCIKSCRPNDVTCVFDPVHTISHTVISLPTFREFWEEIIFLRAITPPHPASQANIIFDITEGNLRDSFDIIKRYMDGMTVGVVRQVRPIVGPFHAVLKLEMNYVVGGVVSHRNVVNVHIFVSEYWF

SEQ ID NO: 165 - DNA, 2255 bp, Homo sapiens
cagcgttggctgccgaggctcggccggagcgtggagcccgcgccgctgccccaggaccgcgcccgcgcctttgtccgccgccgcccaccgcccgtcgcccgccgcccatggagcgcgccgcgccgtcgcgccgggtcccgcttccgctgctgctgctcggcggccttgcgctgctggcggccggagtggacgcggatgtcctcctggaggcctgctgtgcggacggacaccggatggccactcatcagaaggactgctcgctgccatatgctacggaatccaaagaatgcaggatggtgcaggagcagtgctgccacagccagctggaggagctgcactgtgccacgggcatcagcctggccaacgagcaggaccgctgtgccacgccccacggtgacaacgccagcctggaggccacatttgtgaagaggtgctgccattgctgtctgctggggagggcggcccaggcccagggccagagctgcgagtacagcctcatggttggctaccagtgtggacaggtcttccgggcatgctgtgtcaagagccaggagaccggagatttggatgtcgggggcctccaagaaacggataagatcattgaggttgaggaggaacaagaggacccatatctgaatgaccgctgccgaggaggcgggccctgcaagcagcagtgccgagacacgggtgacgaggtggtctgctcctgcttcgtgggctaccagctgctgtctgatggtgtctcctgtgaagatgtcaatgaatgcatcacgggcagccacagctgccggcttggagaatcctgcatcaacacagtgggctctttccgctgccagcgggacagcagctgcgggactggctatgagctcacagaggacaatagctgcaaagatattgacgagtgtgagagtggtattcataactgcctccccgattttatctgtcagaatactctgggatccttccgctgccgacccaagctacagtgcaagagtggctttatacaagatgctctaggcaactgtattgatatcaatgagtgtttgagtatcagtgccccgtgccctattgggcatacatgcatcaacacagagggctcctacacgtgccagaagaacgtgcccaactgtggccgtggctaccatctcaacgaggagggaacgcgctgtgttgatgtggacgagtgcgcgccacctgctgagccctgtgggaagggacatcgctgcgtgaactctcccggcagtttccgctgcgaatgcaagacgggttactattttgacggcatcagcaggatgtgtgtcgatgtcaacgagtgccagcgctaccccgggcgcctgtgtggccacaagtgcgagaacacgctgggctcctacctctgcagctgttccgtgggcttccggctctctgtggatggcaggtcatgtgaagacatcaatgagtgcagcagcagcccctgtagccaggagtgtgccaacgtctacggctcctaccagtgttactgccggcgaggctaccagctcagcgatgtggatggagtcacctgtgaagacatcgacgagtgcgccctgcccaccgggggccacatctgctcctaccgctgcatcaacatccctggaagcttccagtgcagctgcccctcgtctggctacaggctggcccccaatggccgcaactgccaagacattgatgagtgtgtgactggcatccacaactgctccatcaacgagacctgcttcaacatccagggcggcttccgctgcctggccttcgagtgccctgagaactaccgccgctccgcagccacccgctgtgagcgcttgccttgccatgagaatcgggagtgctccaagctgcctctgagaataacctactaccacctctctttccccaccaacatccaagcgcccgcggtggttttccgcatgggcccctccagtgctgtccccggggacagcatgcagctggccatcaccggcggcaatgaggagggctttttcaccacccggaaggtgagcccccacagtggggtggtggccctcaccaagcctgtccccgagcccagggacttgctcctgaccgtcaagatggatctctctcgccacggcaccgtcagctcctttgtggccaagcttttcatctttgtgtctgcagagctctgagcactcgcttcgcgtcgcggggtctccctcctgttgctttcctaaccctgccctccggggcgttaataaagtcttagcaagcgtcccacacagtga

SEQ ID NO: 166 - protein, 681 aa, Homo sapiens
MERAAPSRRVPLPLLLLGGLALLAAGVDADVLLEACCADGHRMATHQKDCSLPYATESKECRMVQEQCCHSQLEELHCATGISLANEQDRCATPHGDNASLEATFVKRCCHCCLLGRAAQAQGQSCEYSLMVGYQCGQVFRACCVKSQETGDLDVGGLQETDKIIEVEEEQEDPYLNDRCRGGGPCKQQCRDTGDEVVCSCFVGYQLLSDGVSCEDVNECITGSHSCRLGESCINTVGSFRCQRDSSCGTGYELTEDNSCKDIDECESGIHNCLPDFICQNTLGSFRCRPKLQCKSGFIQDALGNCIDINECLSISAPCPIGHTCINTEGSYTCQKNVPNCGRGYHLNEEGTRCVDVDECAPPAEPCGKGHRCVNSPGSFRCECKTGYYFDGISRMCVDVNECQRYPGRLCGHKCENTLGSYLCSCSVGFRLSVDGRSCEDINECSSSPCSQECANVYGSYQCYCRRGYQLSDVDGVTCEDIDECALPTGGHICSYRCINIPGSFQCSCPSSGYRLAPNGRNCQDIDECVTGIHNCSINETCFNIQGGFRCLAFECPENYRRSAATRCERLPCHENRECSKLPLRITYYHLSFPTNIQAPAVVFRMGPSSAVPGDSMQLAITGGNEEGFFTTRKVSPHSGVVTKPVPEPRDLLLTVKMDLSRHGTVSSFVAKLFIFVSAEL

SEQ ID NO: 167 - DNA, 2622 bp, Homo sapiens
cagcgttggctgccgaggctcggccggagcgtggagcccgcgccgctgccccaggaccgcgcccgcgcctttgtccgccgccgcccaccgcccgtcgcccgccgcccatggagcgcgccgcgccgtcgcgccgggtcccgcttccgctgctgctgctcggcggccttgcgctgctggcggccggagtggacgcggatgtcctcctggaggcctgctgtgcggacggacaccggatggccactcatcagaaggactgctcgctgccatatgctacggaatccaaagaatgcaggatggtgcaggagcagtgctgccacagccagctggaggagctgcactgtgccacgggcatcagcctggccaacgagcaggaccgctgtgccacgccccacggtgacaacgccagcctggaggccacatttgtgaagaggtgctgccattgctgtctgctggggagggcggcccaggcccagggccagagctgcgagtacagcctcatggttggctaccagtgtggacaggtcttccgggcatgctgtgtcaagagccaggagaccggagatttggatgtcgggggcctccaagaaacggataagatcattgaggttgaggaggaacaagaggacccatatctgaatgaccgctgccgaggaggcgggccctgcaagcagcagtgccgagacacgggtgacgaggtggtctgctcctgcttcgtgggctaccagctgctgtctgatggtgtctcctgtgaagatgtcaatgaatgcatcacgggcagccacagctgccggcttggagaatcctgcatcaacacagtgggctctttccgctgccagcgggacagcagctgcgggactggctatgagctcacagaggacaatagctgcaaagatattgacgagtgtgagagtggtattcataactgcctccccgattttatctgtcagaatactctgggatccttccgctgccgacccaagctacagtgcaagagtggctttatacaagatgctctaggcaactgtattgatatcaatgagtgtttgagtatcagtgccccgtgccctattgggcatacatgcatcaacacagagggctcctacacgtgccagaagaacgtgcccaactgtggccgtggctaccatctcaacgaggagggaacgcgctgtgttgatgtggacgagtgcgcgccacctgctgagccctgtgggaagggacatcgctgcgtgaactctcccggcagtttccgctgcgaatgcaagacgggttactattttgacggcatcagcaggatgtgtgtcgatgtcaacgagtgccagcgctaccccgggcgcctgtgtggccacaagtgcgagaacacgctgggctcctacctctgcagctgttccgtgggcttccggctctctgtggatggcaggtcatgtgaagacatcaatgagtgcagcagcagcccctgtagccaggagtgtgccaacgtctacggctcctaccagtgttactgccggcgaggctaccagctcagcgatgtggatggagtcacctgtgaagacatcgacgagtgcgccctgcccaccgggggccacatctgctcctaccgctgcatcaacatccctggaagcttccagtgcagctgcccctcgtctggctacaggctggcccccaatggccgcaactgccaagacattgatgagtgtgtgactggcatccacaactgctccatcaacgagacctgcttcaacatccagggcggcttccgctgcctggccttcgagtgccctgagaactaccgccgctccgcagccacgcagaaatccaagaagggaaggcagaacaccccagcgggatcaagtaaagaggactgcagggttcttccatggaagcaggggttggaggatacccaccttgatgcctagtgaggaagatggacctggacagacagtcagctccacaccttgcgctgagcagctgtgattgtgccacgggagcatgagcccttttccccacggcccttgccactgtctcctggccctctctctgatcatgccaggtttgcaccagcctcgagtctcccatgttgtagtacattctccaagatgcagcccaggagcctctctgaaggaccagtctggttacgatggtctgagcttccttagaaccttccatggttgtcttttcccagcagatgaagcatagcctccttggaatggcatgggaggcctggcctgatctggcctctgcccaccctttgagctgtacctgccccaccccagctcatccatgtgcttgtaccctggccccacggggaggcttgcccttccctgaatctgccttcttgtggctttagcatgtgccatgctgtccccctgcagactgccattctccttgcagacttggctcagaagtcacctcctcagtgcagttagcctgagctcccctggccccaggtgcctccatcagagcatttaccccattgtgttgtggctgttccttaacgtccccactagccaggctctttgagggcagggattgtgtctggttaatttctgtattctctgcaactttgcaatgtttggcttgaagaaggagctcagtaaacatctgaataaacatgcaggttgatgg

SEQ ID NO: 168 - protein, 601 aa, Homo sapiens
MERAAPSRRVPLPLLLLGGLALLAAGVDADVLLEACCADGHRMATHQKDCSLPYATESKECRMVQEQCCHSQLEELHCATGISLANEQDRCATPHGDNASLEATFVKRCCHCCLLGRAAQAQGQSCEYSLMVGYQCGQVFRACCVKSQETGDLDVGGLQETDKIIEVEEEQEDPYLNDRCRGGGPCKQQCRDTGDEVVCSCFVGYQLLSDGVSCEDVNECITGSHSCRLGESCINTVGSFRCQRDSSCGTGYELTEDNSCKDIDECESGIHNCLPDFICQNTLGSFRCRPKLQCKSGFIQDALGNCIDINECLSISAPCPIGHTCINTEGSYTCQKNVPNCGRGYHLNEEGTRCVDVDECAPPAEPCGKGHRCVNSPGSFRCECKTGYYFDGISRMCVDVNECQRYPGRLCGHKCENTLGSYLCSCSVGFRLSVDGRSCEDINECSSSPCSQECANVYGSYQCYCRRGYQLSDVDGVTCEDIDECALPTGGHICSYRCINIPGSFQCSCPSSGYRLAPNGRNCQDIDECVTGIHNCSINETCFNIQGGFRCLAFECPENYRRSAATQKSKKGRQNTPAGSSKEDCRVLPWKQGLEDTHLDA
